(19) United States
(12) Patent Application Publication
(10) Pub. No.: US 2021/0196809 A1
(43) Pub. Date: Jul. 1, 2021

(54) CANCER VACCINE

(71) Applicant: President and Fellows of Harvard College, Cambridge, MA (US)

(72) Inventors: Juan Pablo Maianti, Revere, MA (US); David R. Liu, Lexington, MA (US)

(73) Assignee: President and Fellows of Harvard College, Cambridge, MA (US)

(21) Appl. No.: 16/492,534

(22) PCT Filed: Mar. 9, 2018
(86) PCT No.: PCT/US2018/021880

§ 371 Date: Sep. 9, 2019

Related U.S. Application Data
(60) Provisional application No. 62/469,219, filed on Mar. 9, 2017.

(51) Int. Cl. A61K 39/00; A61K 38/50; A61K 31/7088; A61K 38/46; A61K 45/06

(52) U.S. Cl. CPC A61K 39/001192; A61K 38/50; A61K 2039/53; A61K 38/465; A61K 45/06; A61K 31/7088

(57) ABSTRACT

Provided herein are systems, compositions, and methods for generating immunogenic peptides or epitopes from tumor associated antigens (e.g., in vivo or ex vivo). Polynucleotides (e.g., genes) encoding the tumor associated antigens may be edited at selected target sites by nucleobase editors comprising a catalytically-inactive Cas9 and a cytosine deaminase, leading to the expression of heteroclitic or cryptic peptides that are more immunogenic than the native peptide derived from the tumor associated antigens. The heteroclitic or cryptic peptide elicit strong tumor-specific immune response (e.g., T-cell response or B-cell response), which inhibits tumor growth and metastasis.

### RELATED APPLICATIONS

[0001] The present application is a national stage filing under 35 U.S.C. § 371 of international PCT application, PCT/US2018/021880, filed Mar. 9, 2018, which claims priority under 35 U.S.C. § 119(e) to U.S. provisional patent application, U.S. Ser. No. 62/469,219, filed Mar. 9, 2017, the entire contents of each of which are incorporated herein by reference.

### REFERENCE TO A SEQUENCE LISTING SUBMITTED AS A TEXT FILE VIA EFS-WEB

[0002] The instant application contains a Sequence Listing which has been submitted in ASCII format via EFS-Web and is hereby incorporated by reference in its entirety. Said ASCII copy, created on Mar. 12, 2021, is named H082470241US01-SEQ-EPG and is 3737 kilobytes in size.

### BACKGROUND OF THE INVENTION

[0003] Tumor-specific immune responses may be elicited by peptides generated from proteins expressed in tumor cells or on tumor cell surface (e.g., tumor-specific antigens). Native peptides derived from tumor-specific antigens are tolerated as “self” by the immune system and do not elicit strong immune response against the tumor-specific antigen. Altered versions of the native peptides derived from tumor-specific antigens (e.g., heteroclitic peptides or cryptic peptides) may be engineered to elicit potent immune reactions through the MHC-I and MHC-II antigen presentation pathways, which also produce cross-reactive responses towards the native tumor-specific antigen sequences.

[0004] It is well established that the immune system can function to kill tumor cells, including both primary and metastatic cancer cells. Indeed, evidence that the immune system recognizes the presence of neoplastic cancerous cells is supported by the existence of infiltrating lymphocytes in tumor tissues (Haskill et al., 1978, Contemp. Top. Immunobiol. 8: 107-170; Vose and Moore, 1985, Semin. Hematol. 22: 27-40). Yet, for reasons that are not completely clear, despite the presence of immune cells, tumors often prevail and not only survive but metastasize to distant sites with unrestricted growth. Recent advances in the understanding of T cell activation and recognition of target cells have begun to permit some progress in development of T cell mediated cancer immunotherapy (Schwartz, 1992, Cell 71: 1065-1068; Pardoll, 1992, Curr. Opin. Immunol. 4: 619-623).

### SUMMARY OF THE INVENTION

[0005] Described herein are systems, methods, compositions, and kits for producing immunogenic peptides derived from tumor specific antigens (e.g., heteroclitic epitopes or cryptic epitopes) that may be used as cancer vaccines in vivo or ex vivo. Targeted mutations are introduced into tumor-specific antigens using gene editing agents, e.g., a nucleobase editor comprising a programmable DNA binding domain (e.g., catalytically-inactive Cas9 or a Cas9 nickase) fused to a cytosine deaminase, to generate altered versions of peptides arising from the tumor-specific antigens (heteroclitic epitopes) or peptides arising from normally untranslated regions of the tumor-specific antigen genes (cryptic peptides). The heteroclitic peptides or cryptic peptides may be generated in vivo in a subject (e.g., a subject who has cancer) and presented to the adaptive immune system via the MHC class I or MHC class II pathway, which in turn induces a strong adaptive immune response, e.g., T cell response and B cell response. Such an adaptive immune response is antigen specific and is effective in reducing tumor growth and preventing metastasis.

[0006] Some aspects of the present disclosure provide methods of eliciting a tumor-specific immune response in a subject in need thereof, the methods including administering to the subject a therapeutically effective amount of a composition comprising: (i) a fusion protein comprising (a) a guide nucleotide sequence-programmable DNA-binding protein domain; and (b) a cytosine deaminase domain; and (ii) a guide nucleotide sequence, wherein the guide nucleotide sequence of (ii) targets the fusion protein of (i) to a polynucleotide encoding a tumor-specific antigen in a tumor cell, wherein the fusion protein changes a target cytosine (C) base to a thymine (T) base via deamination.

[0007] In some embodiments, the polynucleotide comprises a coding strand and a complementary strand. In some embodiments, the polynucleotide comprises a coding region and a non-coding region. In some embodiments, the polynucleotide encoding the tumor-specific antigen is located in the genome of the tumor cell. In some embodiments, deamination of the target C base results in a C-G base-pair to thymine-adenine (T-A) base-pair change.

[0008] In some embodiments, the guide nucleotide sequence-programmable DNA binding protein domain is selected from the group consisting of: nuclease inactive Cas9 (dCas9) domains, nuclease inactive Cpf1 domains, nuclease inactive Argonaute domains, and variants thereof.

[0009] In some embodiments, the guide nucleotide sequence-programmable DNA-binding protein domain is a nuclease inactive Cas9 (dCas9) domain. In some embodiments, the amino acid sequence of the dCas9 domain comprises mutations corresponding to a D10A and/or H840A mutation in SEQ ID NO: 1. In some embodiments, the amino acid sequence of the dCas9 domain comprises a mutation corresponding to a D10A mutation in SEQ ID NO: 1, and wherein the dCas9 domain comprises a histidine at the position corresponding to amino acid 840 of SEQ ID NO: 1.

[0010] In some embodiments, the guide nucleotide sequence-programmable DNA-binding protein domain comprises a nuclease inactive Cpf1 (dCpf1) domain. In some embodiments, the dCpf1 domain is from a species of Acidaminococcus or Lachnospiraceae. In some embodiments, the guide nucleotide sequence-programmable DNA-binding protein domain comprises a nuclease inactive Argonaute (dAgo) domain. In some embodiments, the (dAgo) domain is from Natronobacterium gregoryi (dNgAgo).

[0011] In some embodiments, the cytosine deaminase domain comprises an apolipoprotein B mRNA-editing complex (APOBEC) family deaminase. In some embodiments, the cytosine deaminase is selected from the group consisting of APOBEC1, APOBEC2, APOBEC3A, APOBEC3B, APOBEC3C, APOBEC3D, APOBEC3F, APOBEC3G deaminase, APOBEC3H deaminase, APOBEC4 deaminase, and activation-induced deaminase (AID). In some embodiments, the cytosine deaminase comprises an amino acid sequence of any of SEQ ID NOs: 27-292, 303, and 1072-1083.

[0012] In some embodiments, the fusion protein of (a) further comprises a uracil glycosylase inhibitor (UGI) domain. In some embodiments, the cytosine deaminase domain is fused to the N-terminus of the guide nucleotide sequence-programmable DNA-binding protein domain. In some embodiments, the UGI domain is fused to the C-terminus of the guide nucleotide sequence-programmable DNA-binding protein domain. In some embodiments, the cytosine deaminase and the guide nucleotide sequence-programmable DNA-binding protein domain is fused via an optional linker. In some embodiments, the UGI domain is fused to the guide nucleotide sequence-programmable DNA-binding protein domain via an optional linker.

[0013] In some embodiments, the fusion protein comprises the structure NH₂-[cytosine deaminase domain]-[optional linker sequence]-[guide nucleotide sequence-programmable DNA-binding protein domain]-[optional linker sequence]-[UGI domain]-COOH.

[0014] In some embodiments, the optional linker comprises (GGGS)ₙ, (SEQ ID NO: 337) (GGGGS)ₙ (SEQ ID NO: 308), (G)n (SEQ ID NO: 783), (EAAAK)ₙ (SEQ ID NO: 309), (GGS)ₙ (SEQ ID NO: 784), SGSETPGTSESATPES (SEQ ID NO: 310), or (XP)n (SEQ ID NO: 785) motif, or a combination of any of these, wherein n is independently an integer between 1 and 30 and wherein X is any amino acid. In some embodiments, the linker comprises the amino acid sequence of SGSETPGTSESATPES (SEQ ID NO: 310). In some embodiments, the linker is (GGS)ₙ(SEQ ID NO: 784), and wherein n is 1, 3, or 7.

[0015] In some embodiments, the fusion protein comprises the amino acid sequence of any one of SEQ ID NOs: 293-302, 1071, and 1084.

[0016] In some embodiments, the tumor specific antigen is selected from the group consisting of: CEA; gp100; Pmel17; mammaglobin-A; Melan-A; MART-1; NY-BR-1; ERBB2; OA1; PAP; PSA; RAB38; NY-MEL-1; TRP-1; gp75; TRP-2; tyrosinase; WT1; CD33; BAGE-1; D393-CD20n; Cyclin-A1; GAGE-1,2,8; GAGE-3,4,5,6,7; GnTVf; HERV-K-MEL; KK-LC-1; KM-HN-1; LAGE-1; LY6K; MAGE-A1; MAGE-A2; MAGE-A3; MAGE-A4; MAGE-A6; MAGE-A9; MAGE-A10; MAGE-A12m; MAGE-C1; MAGE-C2; mucink; NA88-A; NY-ESO-1; LAGE-2; SAGE; Sp17; SSX-2; SSX-4; survivin; BIRCS; TAG-1; TAG-2; TRAG-3; TRP2-INT2g; XAGE-1b; GAGED2a; BCR-ABL (b3a2); adipophilin; AIM-2; ALDH1A1; BCLX(L); BING-4; CALCA; CD45; CD274; CPSF; cyclin D1; DKK1; ENAH (hMena); EpCAM; EphA3; EZH2; FGFS; glypican-3; G250; MN; CAIX; HER-2; neu; HLA-DOB; Hepsin; IDO1; IGF2B3; IL13Ralpha2; Intestinal carboxyl esterase; alpha-foetoprotein; Kallikrein 4; KIF20A; Lengsin; M-CSF; MCSP; mdm-2; Meloe; Midkine; MMP-2; MMP-7; MUC1; MUC5AC; p53; PAXS; PBF; PRAME; PSMA; RAGE-1; RGSS; RhoC; RNF43; RU2AS; secernin 1; SOX10; STEAP1; Telomerase; TPBG; and VEGF.

[0017] In some embodiments, the target C base is in a target codon located in a coding region of the polynucleotide encoding the tumor-specific antigen. In some embodiments, the target codon is any one of the target codons in Tables 4 and 8.

[0018] In some embodiments, the target codon is converted to a modified codon selected from any one of the modified codons in Table 4. In some embodiments, the target C base is located in a non-coding region of the polynucleotide encoding the tumor specific antigen. In some embodiments, the target C base is located in an intron in the polynucleotide encoding the tumor specific antigen.

[0019] In some embodiments, the methods described herein further comprising generating an immunogenic peptide from the tumor-specific antigen. In some embodiments, the immunogenic peptide is a heteroclitic epitope. In some embodiments, the heteroclitic epitope is at least 2 fold, at least 5 fold, at least 10 fold, at least 20 fold, at least 30 fold, at least 40 fold, at least 50 fold, at least 60 fold, at least 70 fold, at least 80 fold, at least 90 fold, at least 100 fold, or more immunogenic than a native epitope from the tumor specific antigen. In some embodiments, the immunogenic peptide is a cryptic epitope. In some embodiments, the cryptic epitope is at least 2 fold, at least 5 fold, at least 10 fold, at least 20 fold, at least 30 fold, at least 40 fold, at least 50 fold, at least 60 fold, at least 70 fold, at least 80 fold, at least 90 fold, at least 100 fold, or more immunogenic than a native epitope from the tumor specific antigen.

[0020] In some embodiments, the immunogenic peptide is displayed on the surface of the tumor cell via the MHC class I antigen presentation pathway. In some embodiments, the immunogenic peptide is displayed on the surface of an antigen presenting cell (APC) via the MHC class II antigen presentation pathway.

[0021] In some embodiments, the method is carried out in vivo. In some embodiments, the method is carried out ex vivo.

[0022] In some embodiments, the APC is selected from the group consisting of: tumor cells, dendritic cells, mononuclear phagocytes, thymic epithelial cells, and B cells.

[0023] In some embodiments, the immunogenic peptide elicits adaptive immune response against the tumor-specific antigen. In some embodiments, the adaptive immune response comprises promoting the maturation of dendritic cells, activation of CD4+ T lymphocytes, activation of CD8+ T lymphocytes, activation and maturation of B lymphocytes, and/or production of tumor antigen-specific antibodies. In some embodiments, the adaptive immune response kills tumor cells, reduces tumor size, and/or prevents metastasis.

[0024] In some embodiments, the guide nucleotide sequence is an RNA. In some embodiments, the RNA is chemically modified.

[0025] In some embodiments, the guide nucleotide sequence is a single strand DNA (ssDNA).

[0026] In some embodiments, the tumor specific antigen is gp100. In some embodiments, the gp100 is from melanoma. In some embodiments, the deamination of the target C base in codon T210 of gp100 results in a T210I mutation. In some embodiments, a heteroclitic epitope comprising the amino acid sequence of IIDQVPFSV (SEQ ID NO: 786) is generated, and wherein the I at position 2 corresponds to the T210I mutation. In some embodiments, the guide nucleotide sequence comprises a nucleotide sequence selected from the group consisting of SEQ ID NOs: 724 and 870-888.

[0027] In some embodiments, the deamination of the target C base in codon A288 of gp100 results in a A288V mutation. In some embodiments, a heteroclitic epitope comprising the amino acid sequence of YLEPGPVTV (SEQ ID NO: 818) is generated, and wherein the V at position 7 corresponds to the A288V mutation. In some embodiments, the guide nucleotide sequence comprises a nucleotide sequence selected from the group consisting of SEQ ID NOs: 725 and 889.

[0028] In some embodiments, the deamination of the target C base in codon T155 of gp100 results in a T155I mutation. In some embodiments, a heteroclitic epitope comprising the amino acid sequence of KIWGQYWQV (SEQ ID NO: 787) is generated, and wherein the I at position 2 corresponds to the T155I mutation. In some embodiments, the guide nucleotide sequence comprises a nucleotide sequence selected from the group consisting of SEQ ID NOs: 726 and 890-892.

[0029] In some embodiments, the tumor specific antigen is melanoma antigen recognized by T cells 1 (MART-1). In some embodiments, the MART-1 antigen is from melanoma. In some embodiments, the deamination of the target C base in codon A27 of MART-1 results in a A27V mutation. In some embodiments, a heteroclitic epitope comprising the amino acid sequence of EVAGIGILTV (SEQ ID NO: 819) is generated, and wherein the V at position 2 corresponds to the A27V mutation. In some embodiments, the guide nucleotide sequence comprises a nucleotide sequence selected from the group consisting of SEQ ID NOs: 727 and 893-896.

[0030] In some embodiments, the tumor specific antigen is cancer/testis antigen 1B (NY-ESO-1). In some embodiments, the NY-ESO-1 antigen is from melanoma or breast cancer. In some embodiments, the deamination of the target C base in codon C165 of NY-ESO-1 results in a C165Y mutation. In some embodiments, a heteroclitic epitope comprising the amino acid sequence of SLLMWITQY (SEQ ID NO: 788) is generated, and wherein the C at position 9 corresponds to the C165Y mutation. In some embodiments, the guide nucleotide sequence comprises a nucleotide sequence selected from the group consisting of SEQ ID NOs: 728 and 897.

[0031] In some embodiments, the tumor specific antigen is Tyrosinase (TYR). In some embodiments, the TYR antigen is from melanoma. In some embodiments, the deamination of the target C base in codon T373 of TYR results in a T373I mutation. In some embodiments, a heteroclitic epitope comprising the amino acid sequence of YMNGIMSQV (SEQ ID NO: 789) is generated, and wherein the I at position 5 corresponds to the T373I mutation. In some embodiments, the guide nucleotide sequence comprises a nucleotide sequence selected from the group consisting of SEQ ID NOs: 729 and 898-901.

[0032] In some embodiments, the tumor specific antigen is tyrosinase-related protein 1 (TyRP1). In some embodiments, the TyRP1 antigen is from melanoma. In some embodiments, the deamination of the target C base in codon C244 of TyRP1 results in a C244Y mutation. In some embodiments, a heteroclitic epitope comprising the amino acid sequence of DAEKYDICTDEY (SEQ ID NO: 790) is generated, and wherein the Y at position 5 corresponds to the C244Y mutation. In some embodiments, the guide nucleotide sequence comprises a nucleotide sequence selected from the group consisting of SEQ ID NOs: 730 and 902.

[0033] In some embodiments, the tumor specific antigen is Survivin. In some embodiments, the Survivin is from melanoma, breast cancer, or leukemia. In some embodiments, the deamination of the target C base in codon T97 of Survivin results in a T97I mutation. In some embodiments, a heteroclitic epitope comprising the amino acid sequence of ELILGEFLKL (SEQ ID NO: 791) is generated, and wherein the I at position 3 corresponds to the T97I mutation. In some embodiments, the guide nucleotide sequence comprises a nucleotide sequence selected from the group consisting of SEQ ID NOs: 731 and 903.

[0034] In some embodiments, the tumor specific antigen is telomerase reverse transcriptase (hTERT). In some embodiments, the hTERT is from breast cancer. In some embodiments, the deamination of the target C base in codon M549 of hTERT results in a M549I mutation. In some embodiments, a heteroclitic epitope comprising the amino acid sequence of ILAKFLHWLI (SEQ ID NO: 792) is generated, and wherein the I at position 10 corresponds to the M549I mutation. In some embodiments, the guide nucleotide sequence comprises a nucleotide sequence selected from the group consisting of SEQ ID NOs: 735 and 916-920.

[0035] In some embodiments, the tumor specific antigen is human epidermal growth factor receptor 2 (HER2). In some embodiments, the HER2 is from breast cancer. In some embodiments, the deamination of the target C base in codon V658 of HER2 results in a V658M mutation. In some embodiments, a heteroclitic epitope comprising the amino acid sequence of AMVGILLVVV (SEQ ID NO: 793) is generated, and wherein the M at position 2 corresponds to the V658M mutation. In some embodiments, the guide nucleotide sequence comprises a nucleotide sequence selected from the group consisting of SEQ ID NOs: 732 and 904-909.

[0036] In some embodiments, the deamination of the target C base in codon T912 of HER2 results in a T912I mutation. In some embodiments, a heteroclitic epitope comprising the amino acid sequence of IIWELMTFGA (SEQ ID NO: 794) is generated, and wherein the V at position 2 corresponds to the T912I mutation. In some embodiments, the guide nucleotide sequence comprises a nucleotide sequence selected from the group consisting of SEQ ID NOs: 733 and 910-912.

[0037] In some embodiments, the deamination of the target C base in codon A920 of HER2 results in a A920V mutation. In some embodiments, a heteroclitic epitope comprising the amino acid sequence of ITWELMTFGV (SEQ ID NO: 795) is generated, and wherein the V at position 10 corresponds to the A920V mutation. In some embodiments, the guide nucleotide sequence comprises a nucleotide sequence selected from the group consisting of SEQ ID NOs: 734 and 913-915.

[0038] In some embodiments, the tumor specific antigen is CD33. In some embodiments, the CD33 is from leukemia. In some embodiments, the deamination of the target C base in codon A65 of CD33 results in a A65V mutation. In some embodiments, a heteroclitic epitope comprising the amino acid sequence of VIISGDSPV (SEQ ID NO: 796) is generated, and wherein the V at position 1 corresponds to the A65V mutation. In some embodiments, the guide nucleotide sequence comprises a nucleotide sequence selected from the group consisting of SEQ ID NOs: 740 and 930-932.

[0039] In some embodiments, the tumor specific antigen is Synovial Sarcoma X Breakpoint 2 (SSX2). In some embodiments, the deamination of the target C base in codon A42 of SSX2 results in a A42V mutation. In some embodiments, a heteroclitic epitope comprising the amino acid sequence of KVSEKIFYV (SEQ ID NO: 797) is generated, and wherein the V at position 2 corresponds to the A42V mutation. In some embodiments, the guide nucleotide sequence comprises a nucleotide sequence selected from the group consisting of SEQ ID NOs: 737 and 921.

[0040] In some embodiments, the tumor specific antigen is Wilm's tumor 1 (WT1) protein. In some embodiments, the WT1 is from leukemia. In some embodiments, the deamination of the target C base in codon C235 of WT1 results in a C235Y mutation. In some embodiments, a heteroclitic epitope comprising the amino acid sequence of YMTWNQMNL (SEQ ID NO: 798) is generated, and wherein the Y at position 1 corresponds to the C235Y mutation. In some embodiments, the guide nucleotide sequence comprises a nucleotide sequence selected from the group consisting of SEQ ID NOs: 738 and 922-925.

[0041] In some embodiments, the deamination of the target C base in codon M236 of WT1 results in a M236I mutation. In some embodiments, a heteroclitic epitope comprising the amino acid sequence of CITWNQMNL (SEQ ID NO: 799) is generated, and wherein the I at position 2 corresponds to the M236I mutation. In some embodiments, the guide nucleotide sequence comprises a nucleotide sequence selected from the group consisting of SEQ ID NOs: 739 and 926-929.

[0042] In some embodiments, the tumor specific antigen is Epithelial cell adhesion molecule precursor (EpCAM). In some embodiments, the deamination of the target C base in codon T192 of EpCAM results in a T1921 mutation. In some embodiments, a heteroclitic epitope comprising the amino acid sequence of ILYENNVII (SEQ ID NO: 800) is generated, and wherein the I at position 9 corresponds to the T1921 mutation. In some embodiments, the guide nucleotide sequence comprises a nucleotide sequence selected from the group consisting of SEQ ID NOs: 741 and 933-934.

[0043] In some embodiments, the tumor specific antigen is carcinoembryonic antigen-related cell adhesion molecules (CEA-CAM). In some embodiments, the CEA-CAM is from colorectal cancer, lung cancer, or breast cancer. In some embodiments, the deamination of the target C base in codon T314 of CEA-CAM results in a T314I mutation. In some embodiments, a heteroclitic epitope comprising the amino acid sequence of LLTFWNPPI (SEQ ID NO: 801) is generated, and wherein the I at position 9 corresponds to the T314I mutation. In some embodiments, the guide nucleotide sequence comprises a nucleotide sequence selected from the group consisting of SEQ ID NOs: 742 and 935-936.

[0044] In some embodiments, the deamination of the target C base in codon T311 of CEA-CAM results in a T311I mutation. In some embodiments, a heteroclitic epitope comprising the amino acid sequence of RITVTTITV (SEQ ID NO: 802) is generated, and wherein the V at position 2 corresponds to the T311I mutation. In some embodiments, the guide nucleotide sequence comprises a nucleotide sequence selected from the group consisting of SEQ ID NOs: 743 and 937-940.

[0045] In some embodiments, the deamination of the target C base in codon T688 of CEA-CAM results in a T688V mutation. In some embodiments, a heteroclitic epitope comprising the amino acid sequence of AVVGIMIGV (SEQ ID NO: 803) is generated, and wherein the V at position 2 corresponds to the T688V mutation. In some embodiments, the guide nucleotide sequence comprises a nucleotide sequence selected from the group consisting of SEQ ID NOs: 744 and 941-947.

[0046] In some embodiments, the deamination of the target C base in codon V695 of CEA-CAM results in a V695M mutation. In some embodiments, a heteroclitic epitope comprising the amino acid sequence of IMIGMLVGV (SEQ ID NO: 804) is generated, and wherein the M at position 5 corresponds to the V695M mutation. In some embodiments, the guide nucleotide sequence comprises a nucleotide sequence selected from the group consisting of SEQ ID NOs: 745 and 948-953.

[0047] In some embodiments, the tumor specific antigen is melanoma-associated antigen A3 (MAGEA3). In some embodiments, the deamination of the target C base in codon H118 of MAGEA3 results in a H118Y mutation. In some embodiments, a heteroclitic epitope comprising the amino acid sequence of KVAELVYFL (SEQ ID NO: 805) is generated, and wherein the Y at position 7 corresponds to the H118Y mutation. In some embodiments, the guide nucleotide sequence comprises a nucleotide sequence selected from the group consisting of SEQ ID NOs: 746 and 954.

[0048] In some embodiments, the tumor specific antigen is melanoma-associated antigen (MAGE) common antigen A3, A1, A4, A2, or A12. In some embodiments, the deamination of the target C base in codon C181 of MAGE common antigen A3, A1, A4, A2, or A12 results in a C181Y mutation. In some embodiments, a heteroclitic epitope comprising the amino acid sequence of YLGLSYDGLL (SEQ ID NO: 806) is generated, and wherein the Y at position 1 corresponds to the C181Y mutation. In some embodiments, the guide nucleotide sequence comprises a nucleotide sequence selected from the group consisting of SEQ ID NOs: 747-750 and 955-983.

[0049] In some embodiments, the tumor specific antigen is MUC-1. In some embodiments, the deamination of the target C base in codon T93 of MUC-1 results in a T93I mutation. In some embodiments, a heteroclitic epitope comprising the amino acid sequence of AIWGQDVTSV (SEQ ID NO: 807) is generated, and wherein the I at position 2 corresponds to the T93I mutation. In some embodiments, the guide nucleotide sequence comprises a nucleotide sequence selected from the group consisting of SEQ ID NOs: 751 and 984-985.

[0050] In some embodiments, the target C base is located in intron 4 of the premelanosome protein (PMEL) gene. In some embodiments, the deamination of the target C base results in a cryptic peptide comprising the amino acid sequence of VYFFLPDHL (SEQ ID NO: 808). In some embodiments, the guide nucleotide sequence comprises a nucleotide selected from the group consisting of SEQ ID NOs: 752-753 and 986-998.

[0051] In some embodiments, the target C base is located on the complementary strand of open reading frame 1 (ORF1) of TYRP1 gene. In some embodiments, the target C base is located in the complementary strain of the first start codon (ATG) of ORF1 of the TYRP1 gene. In some embodiments, the deamination of the target C base results in a cryptic peptide comprising the amino acid sequence of MSLQRQFLR (SEQ ID NO: 809). In some embodiments, the guide nucleotide sequence comprises a nucleotide selected from the group consisting of SEQ ID NOs: 754 and 999-1005.

[0052] In some embodiments, the target C base is located on the complementary strand of the last base of intron 2 of the mannosyl (alpha-1,6-)-glycoprotein beta-1,6-N-acetyl glucosaminyltransferase (MGAT5) gene. In some embodiments, the deamination of the target C base results in a cryptic peptide comprising the amino acid sequence of VLPDVFIRCV (SEQ ID NO: 810). In some embodiments, the cryptic peptide is translated from exon 3 of the MGAT5 gene. In some embodiments, the guide nucleotide sequence comprises a nucleotide selected from the group consisting of SEQ ID NOs: 755 and 1006-1008.

[0053] In some embodiments, the target C base is located in open reading frame 1 (ORF1) of cancer/testis antigen 2 (LAGE-1) gene. In some embodiments, the target C base is located in the complementary strand of the first start codon of ORF1 of the LAGE-1 gene. In some embodiments, the deamination of the target C base results in a cryptic peptide comprising the amino acid sequence of selected from the group consisting of: MLMAQEALAFL (SEQ ID NO: 811), LAAQERRVPR (SEQ ID NO: 812), APRGVRMAV (SEQ ID NO: 813), QGAMLAAQERRVPRAAEVPR (SEQ ID NO: 814), and CLSRRPWKRSWSAGSCPGMPHL (SEQ ID NO: 815). In some embodiments, the guide nucleotide sequence comprises a nucleotide selected from the group consisting of SEQ ID NOs: 756 and 1009-1014.

[0054] In some embodiments, the target C base is located in intron 2 of tyrosinase-related protein 2 (TRP-2) gene. In some embodiments, the target C base is located on the complementary strand of the first base of intron 2 of the TRP-2 gene. In some embodiments, the deamination of the target C base results in a cryptic peptide comprising the amino acid sequence of EVISCKLIKR (SEQ ID NO: 816). In some embodiments, the guide nucleotide sequence comprises a nucleotide selected from the group consisting of SEQ ID NOs: 757-758 and 1015-1023.

[0055] In some embodiments, the target C base is located in intron 2 of baculoviral IAP repeat containing 5 (BIRCS) gene. In some embodiments, the target C base is located on the spliceosome branch site of intron 2 of the BIRCS gene. In some embodiments, the target C base is located in the complementary strand of the last base of intron 2 of the BIRCS gene. In some embodiments, the deamination of the target C base results in a cryptic peptide comprising the amino acid sequence of AYACNTSTL (SEQ ID NO: 817). In some embodiments, the guide nucleotide sequence comprises a nucleotide selected from the group consisting of SEQ ID NOs: 759 and 1024-1029.

[0056] In some embodiments, the target C base is located in intron 1 acceptor site of BCR/ABL fusion proteins (BCR/ABL-00F) gene. In some embodiments, the target C base is located in intron 2 acceptor site of BCR/ABL fusion proteins (BCR/ABL-00F) gene. In some embodiments, the deamination of the target C base results in a cryptic peptide comprising the amino acid sequence of any one of SSKALQRPV (SEQ ID NO: 603), GFKQSSKAL (SEQ ID NO: 604), and ATGFKQSSKALQRPVAS (SEQ ID NO: 605). In some embodiments, the guide nucleotide sequence comprises a nucleotide selected from the group consisting of SEQ ID NOs: 761 and 1032-1045. In some embodiments, the guide nucleotide sequence comprises a nucleotide selected from the group consisting of SEQ ID NOs: 762 and 1046-1056.

[0057] In some embodiments, the methods further comprising administering to the subject a therapeutically effective amount of an immune checkpoint inhibitor. In some embodiments, the immune checkpoint inhibitor inhibits binding of CTLA-4, PD-1, PD-L1, TIM3, LAG3, B7-H3, B7-H4, BTLA, GAL9, Chk1, or A2aR to a cognate binding partner. In some embodiments, the immune checkpoint inhibitor is an antibody or a fragment thereof. In some embodiments, the antibody is selected from anti-CTLA-4 antibodies, anti-PD-1 antibodies, anti-PD-L1 antibodies, anti-TIM3 antibodies, anti-LAG3 antibodies, anti-B7-H3 antibodies, anti-B7-H4 antibodies, anti-BTLA antibodies, anti-GAL9 antibodies, anti-Chk1 antibodies, and anti-A2aR antibodies. In some embodiments, the antibody is selected from pembrolizumab, nivolumab, and ipilimumab.

[0058] In some embodiments, the immune checkpoint inhibitor is a small molecule.

[0059] In some embodiments, the immune checkpoint inhibitor is a recombinant protein.

[0060] In some embodiments, the immune checkpoint inhibitor is a nucleic acid aptamer.

[0061] In some embodiments, the immune checkpoint inhibition is performed by genome editing of a gene selected from the group consisting of: CTLA-4, PD-1, PD-L1, TIM3, LAG3, B7-H3, B7-H4, BTLA, GAL9, Chk1, or A2aR.

[0062] Other aspects of the present disclosure provide methods of treating cancer, the methods including administering to a subject in need thereof a therapeutically effective amount of a composition comprising: (i) a fusion protein comprising (a) a guide nucleotide sequence-programmable DNA-binding protein domain; and (b) a cytosine deaminase domain; and (ii) a guide nucleotide sequence; wherein the fusion protein of (i) and the guide nucleotide sequence of (ii) enters a tumor cell, and wherein the guide nucleotide sequence targets the fusion protein of (i) to a polynucleotide encoding a tumor-specific antigen, wherein the fusion protein changes a target cytosine (C) residue to a (T) residue in the polynucleotide.

[0063] In some embodiments, the methods include administering to the subject a therapeutically effective amount of an immune checkpoint inhibitor.

[0064] Further provided herein are methods of inducing a tumor-specific immune response in a subject in need thereof, the method comprising administering to the subject a therapeutically effective amount of a composition comprising: (i) a fusion protein comprising (a) a guide nucleotide sequence-programmable DNA-binding protein domain; and (b) a nuclease domain; and (ii) a guide nucleotide sequence; wherein the fusion protein of (i) and the guide nucleotide sequence of (ii) enters the tumor cell, and wherein the guide nucleotide sequence targets the fusion protein of (i) to a polynucleotide encoding a tumor-specific antigen, wherein the fusion protein introduces an indel in the polynucleotide. In some embodiments, the nuclease is a FokI nuclease.

[0065] Further provided herein are methods of inducing a tumor-specific immune response in a subject in need thereof, the methods including administering to the subject a therapeutically effective amount of a composition comprising: (i) a guide nucleotide sequence-programmable nuclease; and (ii) a guide nucleotide sequence; wherein the fusion protein of (i) and the guide nucleotide sequence of (ii) enters the tumor cell, and wherein the guide nucleotide sequence targets the fusion protein of (i) to a polynucleotide encoding a tumor-specific antigen, wherein the guide nucleotide sequence-programmable nuclease introduces an indel in the polynucleotide.

[0066] In some embodiments, the guide nucleotide sequence-programmable nuclease comprises a Cas9, a Cpf1, an Argonaute, or a variant thereof. In some embodiments, the indel causes a mutation or frame shift.

[0067] Method of inducing a tumor-specific immune response in a subject in need thereof are also provided, the methods including administering to a subject in need thereof a therapeutically effective amount of a composition comprising a fusion protein comprising (a) a programmable DNA-binding protein domain; and (b) a deaminase domain; wherein the fusion protein enters the tumor cell and changes a target base in the polynucleotide via deamination.

[0068] In some embodiments, the deaminase domain comprises a cytosine deaminase and the target base is a cytosine (C) base. In some embodiments, the programmable DNA-binding domain comprises a zinc finger nuclease (ZFN). In some embodiments, the programmable DNA-binding domain comprises a transcription activator-like effector (TALE).

[0069] In some embodiments, the programmable DNA-binding domain is a guide nucleotide sequence-programmable DNA binding protein domain. In some embodiments, the programmable DNA-binding domain is selected from the group consisting of: nuclease-inactive Cas9 domains, nuclease inactive Cpf1 domains, nuclease inactive Argonaute domains, and variants thereof. In some embodiments, the programmable DNA-binding domain is associated with a guide nucleotide sequence. In some embodiments, the deamination of the target C base results in a C to thymine (T) change. In some embodiments, the deamination of the target C base results in a C-G base pair to thymine-adenine (T-A) change in a translated codon, resulting in the incorporation of a different amino acid in an immunogenic or heteroclitic peptide. In some embodiments, the deamination of the target C base results in a C-G basepair to thymine-adenine (T-A) change in an non-coding intron region of a gene, resulting in alternative splicing and translation of immunogenic or cryptic peptide sequences. In some embodiments, the deamination of the target C base results in a C-G basepair to thymine-adenine (T-A) change in the start (Met) codon of the open reading frame of a gene, resulting in the translation of an alternative open reading frame comprising immunogenic or cryptic peptide sequences.

[0070] Other aspects of the present disclosure provide compositions comprising: (i) a fusion protein comprising (a) a guide nucleotide sequence-programmable DNA-binding protein domain; and (b) a cytosine deaminase domain; and (ii) a guide nucleotide sequence targeting the fusion protein of (i) to a polynucleotide encoding a tumor specific antigen.

[0071] Yet other aspects of the present disclosure provide compositions comprising a polynucleotide encoding a fusion protein and a guide nucleotide sequence, wherein the fusion protein comprises (a) a guide nucleotide sequence-programmable DNA-binding protein domain; and (b) a cytosine deaminase domain, and wherein the guide nucleotide sequence targets the fusion protein to a polynucleotide encoding a tumor specific antigen.

[0072] Yet other aspects of the present disclosure provide cancer vaccines comprising: (i) a fusion protein comprising (a) a guide nucleotide sequence-programmable DNA-binding protein domain; and (b) a cytosine deaminase domain; and (ii) a guide nucleotide sequence targeting the fusion protein of (i) to a polynucleotide encoding a tumor specific antigen.

[0073] Further provided herein are cancer vaccine comprising a polynucleotide encoding a fusion protein and a guide nucleotide sequence, wherein the fusion protein comprises (a) a guide nucleotide sequence-programmable DNA-binding protein domain; and (b) a cytosine deaminase domain, and wherein the guide nucleotide sequence targets the fusion protein to a polynucleotide encoding a tumor specific antigen.

[0074] Kits comprising the cancer vaccines described herein are also provided.

[0075] The details of certain embodiments of the disclosure are set forth in the Detailed Description of Certain Embodiments, as described below. Other features, objects, and advantages of the disclosure will be apparent from the Definitions, Examples, Figures, and Claims.

### BRIEF DESCRIPTION OF THE DRAWINGS

[0076] The accompanying drawings, which constitute a part of this specification, illustrate several embodiments of the disclosure and together with the description, serve to explain the principles of the disclosure.

[0077] FIG. 1 shows strategies to engineer heteroclitic and cryptic epitopes using genome base editing.

[0078] FIG. 2A shows strategies to introduce immunogenic heteroclitic epitopes by editing conservative anchor residues to match the binding preference of the main HLA allele supertypes. The example shows a base-editing reaction that turns an alanine residue at anchor position 9 of a weakly immunogenic peptide epitope into a preferred valine residue for binding HLA-A2.

[0079] FIG. 2B shows anchor-residue binding preference and population coverage of the main HLA allele supertypes (MHC-I pathway). The peptides in FIG. 2B are as follows: HLA A1, A2, A3, and A24 (SEQ ID NOs: 878-881) and HLA B7, B27, B44, B58, and B62 (SEQ ID NOs: 882-886).

[0080] FIG. 3 shows a proposed mechanism for anti-cancer vaccination by heteroclitic/cryptic epitopes introduced by genome base-editing reactions programmed by guide-RNAs. The edited tumor cells produce heteroclitic and cryptic epitopes in cancer-specific genes, which chemotactic ally attract immature dendritic cells (DCs) (1a), inducing DC maturation (1b). Edited tumor cells produce apoptotic bodies (2a) that are taken up by DCs (2b), contributing to maturation of DCs (1b) and B cells (2b′). Mature DCs activate CD4+ T lymphocytes (1c) and CD8+ T lymphocytes (1c′). Activated CD4+ T lymphocytes further stimulate B-lymphocyte activation (1d) and provide IL-2 for CD8+ T lymphocytes (1d′). B lymphocytes produce TAA-specific antibodies to cell-surface proteins that result in antibody-dependent cell-mediated cytotoxicity or complement-mediated tumor cell death (1e). Activated CD8+ T lymphocytes then kill tumor cells via recognition of MHC class I molecules in association with TAA epitopes (1e′).

[0081] FIG. 4 shows comparison of cancer lineages that display high frequency of mutagenesis, which may harbor non-synonymous hitchhiker mutations and “neo-epitopes”.

### DEFINITIONS

[0082] As used herein and in the claims, the singular forms “a,” “an,” and “the” include the singular and the plural reference unless the context clearly indicates otherwise. Thus, for example, a reference to “an agent” includes a single agent and a plurality of such agents.

[0083] An “immunogenic peptide” or “antigenic peptide” is a peptide or epitope that can be recognized by the immune system and elicit an immune response. Immunogenic peptides or antigenic peptide may comprise a motif such that the peptide will bind an MHC molecule and induce a T cell response, or can be recognized by the B cell receptor on the B cell to induce antibody production. These terms are used interchangeably herein.

[0084] An “immunogenic epitope” or “antigenic epitope” refers to a part of an antigen is recognized by the immune system, e.g., by antibodies, B cells, or T cells. In some embodiments, the epitope is the specific piece of the antigen to which an antibody binds. Although epitopes are usually non-self proteins, sequences derived from the host can, in some instances, be recognized.

[0085] “Immune response” is how your body recognizes and defends itself against bacteria, viruses, and substances that appear foreign and harmful to the body. In its general form, the immune response begins with the sensitization of helper (TH, CD4+) and cytotoxic (CD8+) T cell subsets through their interaction with antigen presenting cells (APC) that express major histocompatibility (MHC)-class I or class II molecules associated with antigenic fragments (i.e., specific amino acid sequences derived from the antigen which bind to MHC I and/or MHC II for presentation on the cell surface). The sensitized or primed CD4+ T cells produce lymphokines that participate in the activation of B cells as well as various T cell subsets. The sensitized CD8+ T cells increase in numbers in response to lymphokines and are capable of destroying any cells that express the specific antigenic fragments associated with matching MHC-encoded class I molecules. Thus, in the course of a cancerous tumor, CTL eradicate cells expressing cancer associated or cancer specific antigens, thereby limiting the progression of tumor spread and disease development.

[0086] The “adaptive immune system,” also known as the acquired immune system, is a subsystem of the overall immune system that is composed of highly specialized, systemic cells and processes that eliminate or prevent pathogen growth. The adaptive immune system is one of the two main immunity strategies found in vertebrates (the other being the innate immune system). Adaptive immunity creates immunological memory after an initial response to a specific pathogen, and leads to an enhanced response to subsequent encounters with that pathogen. This process of acquired immunity is the basis of vaccination. Like the innate system, the adaptive system includes both humoral immunity components and cell-mediated immunity components.

[0087] Unlike the innate immune system, the adaptive immune system is highly specific to a particular pathogen or antigen. Adaptive immunity can also provide long-lasting protection. The adaptive system response destroys invading pathogens and any toxic molecules they produce. In accordance with the present disclosure, the adaptive immune system response destroys tumor or cancer cells. Sometimes the adaptive system is unable to distinguish harmful from harmless foreign molecules. The cells that carry out the adaptive immune response are white blood cells known as lymphocytes. Two main broad classes—antibody responses and cell mediated immune response—are also carried by two different lymphocytes (B cells and T cells). In antibody responses, B cells are activated to secrete antibodies, which are proteins also known as immunoglobulins. Antibodies travel through the bloodstream and bind to the foreign antigen causing it to inactivate, which does not allow the antigen to bind to the host.

[0088] In adaptive immunity, pathogen-specific receptors are “acquired” during the lifetime of the organism (whereas in innate immunity pathogen-specific receptors are already encoded in the germline). The acquired response is called “adaptive” because it prepares the body's immune system for future challenges (though it can actually also be maladaptive when it results in autoimmunity).

[0089] The immune system is highly adaptable because of somatic hypermutation (a process of accelerated somatic mutations), and V(D)J recombination (an irreversible genetic recombination of antigen receptor gene segments). This mechanism allows a small number of genes to generate a vast number of different antigen receptors, which are then uniquely expressed on each individual lymphocyte. Since the gene rearrangement leads to an irreversible change in the DNA of each cell, all progeny (offspring) of that cell inherit genes that encode the same receptor specificity, including the memory B cells and memory T cells that are the keys to long-lived specific immunity.

[0090] A “T cell” or “T lymphocyte” is a type of lymphocyte (a subtype of white blood cell) that plays a central role in cell-mediated immunity. T cells can be distinguished from other lymphocytes, such as B cells and natural killer cells, by the presence of a T-cell receptor on the cell surface. They are called T cells because they mature in the thymus from thymocytes. The several subsets of T cells each have a distinct function. The majority of human T cells rearrange their alpha and beta chains on the cell receptor and are termed alpha beta T cells (αβ T cells) and are part of the adaptive immune system. Specialized gamma delta T cells, (a small minority of T cells in the human body, more frequent in ruminants), have invariant T cell receptors with limited diversity, that can effectively present antigens to other T cells and are considered to be part of the innate immune system. Effector T cell broadly includes various T cell types that actively respond to a stimulus, such as co-stimulation. This includes helper, killer, regulatory, and potentially other T cell types. One skilled in the art is familiar with different types of T cells and their respective roles in adaptive immune response.

[0091] A “human leukocyte antigen (HLA) system” is a gene complex encoding the major histocompatibility complex (MHC) proteins in humans. These cell-surface proteins are responsible for the regulation of the immune system in humans. The HLA gene complex resides on a 3 Mbp stretch within chromosome 6p21. HLA genes are highly polymorphic, which means that they have many different alleles, allowing them to fine-tune the adaptive immune system. The proteins encoded by certain genes are also known as antigens, as a result of their historic discovery as factors in organ transplants. Different classes have different functions:

[0092] HLAs encoding major histocompatibility complex (MHC) class I MHC class I (A, B, and C) molecules, which present peptides from inside the cell. “Major histocompatibility complex (MHC) class I” or “MHC class I” molecules are found on the cell surface of all nucleated cells in the body. Their function is to display peptide fragments of antigens from within the cell to cytotoxic T cells; this will trigger an immediate response from the immune system against a particular non-self antigen displayed with the help of an MHC class I protein. Because MHC class I molecules present peptides derived from cytosolic proteins, the pathway of MHC class I presentation is often called cytosolic or endogenous pathway.

[0093] Class I MHC molecules bind peptides generated mainly from degradation of cytosolic proteins by the proteasome. The MHC I peptide complex is then inserted via endoplasmic reticulum into the external plasma membrane of the cell. The epitope peptide is bound on extracellular parts of the class I MHC molecule. Thus, the function of the class I MHC is to display intracellular proteins to cytotoxic T cells (CTLs). However, class I MHC can also present peptides generated from exogenous proteins, in a process known as cross-presentation.

[0094] A normal cell will display peptides from normal cellular protein turnover on its class I MHC, and CTLs will not be activated in response to them due to central and peripheral tolerance mechanisms. When a cell expresses foreign proteins, such as after viral infection, a fraction of the class I MHC will display these peptides on the cell surface. Consequently, CTLs specific for the MHC:peptide complex will recognize and kill presenting cells. Alternatively, class I MHC itself can serve as an inhibitory ligand for natural killer cells (NKs). Reduction in the normal levels of surface class I MHC, a mechanism employed by some viruses during immune evasion or in certain tumors, will activate NK cell killing. Antigens or antigenic epitopes presented by MHC class II molecules are recognized by cytotoxic T cells.

[0095] HLAs encoding MHC class II (DP, DM, DOA, DOB, DQ, and DR) molecules, which present antigens from outside of the cell to T-lymphocytes. “Major histocompatibility complex class II” or “MHC class II” molecules are a family of molecules normally found only on antigen-presenting cells such as dendritic cells, mononuclear phagocytes, some endothelial cells, thymic epithelial cells, and B cells. The antigens presented by class II peptides are usually derived from extracellular proteins (not cytosolic as in class I); hence, the MHC class II-dependent pathway of antigen presentation is called the endocytic or exogenous pathway. Loading of a MHC class II molecule occurs by phagocytosis; extracellular proteins are endocytosed, digested in lysosomes, and the resulting epitopic peptide fragments are loaded onto MHC class II molecules prior to their migration to the cell surface. Antigens or antigenic epitopes presented by MHC class II molecules are recognized by T helper cells and stimulate the multiplication of T-helper cells, which in turn stimulate antibody-producing B-cells to produce antibodies to that specific antigen. Self-antigens are suppressed by regulatory T cells.

[0096] An “antigen-presenting cell (APC)” is a cell that displays antigen complexed with major histocompatibility complexes (MHCs) on their surfaces; this process is known as antigen presentation. T cells may recognize these complexes using their T cell receptors (TCRs). These cells process antigens and present them to T-cells. Antigen-presenting cells fall into two categories: professional and non-professional. Those that express MHC class II molecules along with co-stimulatory molecules and pattern recognition receptors are often called professional antigen-presenting cells. The non-professional APCs express MHC class I molecules.

[0097] Professional APCs specialize in presenting antigen to T cells. They are very efficient at internalizing antigens, either by phagocytosis (macrophages and dendritic cells) or by receptor-mediated endocytosis (B cells), processing the antigen into peptide fragments and then displaying those peptides, bound to a class II MHC molecule, on their membrane.[1] The T cell recognizes and interacts with the antigen-class II MHC molecule complex on the membrane of the antigen-presenting cell. An additional co-stimulatory signal is then produced by the antigen-presenting cell, leading to activation of the T cell. The expression of co-stimulatory molecules and MHC class II are defining features of professional APCs.

[0098] Almost all cell types can serve as a non-professional APC. They are found in a variety of tissue types. Professional antigen-presenting cells, including dendritic cells, mononuclear phagocytes, thymic epithelial cells, and B cells, present foreign antigens to helper T cells, while other cell types can present antigens originating inside the cell to cytotoxic T cells. In addition to the MHC family of proteins, antigen presentation relies on other specialized signaling molecules on the surfaces of both APCs and T cells.

[0099] A “B lymphocyte” or “B cell” is a type of white blood cell of the lymphocyte subtype. B cells function in the humoral immunity component of the adaptive immune system by secreting antibodies. Additionally, B cells present antigen (they are also classified as professional antigen-presenting cells (APCs)) and secrete cytokines. In mammals, B cells mature in the bone marrow, which is at the core of most bones. B cells express B cell receptors (BCRs) on their cell membrane. BCRs allow the B cell to bind a specific antigen, against which it will initiate an antibody response.

[0100] “Cancer immunotherapy” refers to a type of cancer treatment designed to boost the body's natural defenses to fight the cancer. It uses substances either made by the body or in a laboratory to improve or restore immune system function.

[0101] “Tumor specific antigen (TSA)” or “tumor associated antigen (TAA)” refers to a protein that is specifically expressed or upregulated in cells of the respective tumor, as compared to non-cancerous cells of the same origin. A tumor specific antigen, or epitopes derived therefrom, can be recognized by the immune system to induce a immune response. Herein, the terms “tumor associated antigen” and “tumor specific antigen” are used interchangeably. The tumor specific antigen may be from all protein classes, e.g., enzymes, receptors, transcription factors, etc.

[0102] A “heteroclitic epitope” or “heteroclitic analog” refers to an altered version of an endogenous peptide sequence (i.e., an analog) engineered to elicit potent immune reactions. Heteroclitic epitopes have increased stimulatory capacity or potency for a specific T cell, as measured by increased responses to a given dose, or by a requirement of lesser amounts to achieve the same response and therefore provide benefit as vaccine components since these epitopes induce T cell responses stronger than those induced by the native epitope.

[0103] A “self-antigen” refers to an antigen that originates from within the body. The immune system usually does not react to self-antigens under normal homeostatic conditions. Epitopes from self-antigens (i.e., self-epitopes) are found in high concentration on the surface of Antigen-presenting cells (APC's) in association with its major histocompatibility complex (MHC) are known as dominant epitopes. These are stimulants of negative selection mechanisms to remove potentially self-destructing autoreactive T cells. Their “self” antigens are displayed to a developing T-cell and signal those “self-reactive” T-cells to die via programmed cell death (apoptosis) and thereby deletion from the T cell repertoire, preventing autoimmunity.

[0104] A “cryptic epitope” refers to an epitope derived from a self-antigen that does not necessarily undergo antigen processing/presentation and are ‘hidden’ from immune recognition. Cryptic epitopes usually appear in very low concentration on APC and do not delete auto-reactive T cells. Cryptic epitopes are not presented for recognition by T cells unless they are produced in unusually large concentrations or unless they are freed from the configuration of their native antigen. Cryptic epitopes derived from tumor-specific antigens may be used to break the tolerance of T cells to the tumor and induce potent immune response against the tumor. Such principles have been described in Pardoll, et al., PNAS, Vol. 96, pp. 5340-5342 (1999), the entire contents of which are incorporated herein by reference.

[0105] A “neoepitope” refers to an antigenic epitope generated via random somatic mutations occurring in tumor cells. Neoepitopes are usually derived from individually specific tumor antigens or unique antigens and is thus specific to the lineage of tumor cells it is derived from. Neoepitopes are regarded in the art to be responsible for the immunogenicity of tumors ((Srivastava et al., 1993, Duan et al., 2009; van der Bruggen et al., 2013), and mathematic modeling has predicted the existence of tens to hundreds of neoepitopes in individual human tumors (Srivastava 2009). The recent revolution in high-throughput DNA sequencing and accompanying bioinformatics approaches has finally made it possible to actually identify the individually specific neoepitopes in individual cancers.

[0106] “Cancer vaccine,” as used herein, refers to a composition that induces tumor-specific immunoresponse against a tumor or a tumor-specific antigen. Such immunoresponse is effective in inhibiting tumor growth and/or preventing reoccurrence of tumor.

[0107] An “intron” refers to any nucleotide sequence within a gene that is removed by RNA splicing during maturation of the final RNA product. The term intron refers to both the DNA sequence within a gene and the corresponding sequence in RNA transcripts. Sequences that are joined together in the final mature RNA after RNA splicing are exons. Introns are found in the genes of most organisms and many viruses, and can be located in a wide range of genes, including those that generate proteins, ribosomal RNA (rRNA), and transfer RNA (tRNA). When proteins are generated from intron-containing genes, RNA splicing takes place as part of the RNA processing pathway that follows transcription and precedes translation.

[0108] An “exon” refers to any part of a gene that will become a part of the final mature RNA produced by that gene after introns have been removed by RNA splicing. The term exon refers to both the DNA sequence within a gene and to the corresponding sequence in RNA transcripts. In RNA splicing, introns are removed and exons are covalently joined to one another as part of generating the mature messenger RNA.

[0109] “RNA splicing” refers to the processing of a newly synthesized messenger RNA transcript (also referred to as a primary mRNA transcript). After splicing, introns are removed and exons are joined together (ligated) for form mature mRNA molecule containing a complete open reading frame that is decoded and translated into a protein. For nuclear-encoded genes, splicing takes place within the nucleus either co-transcriptionally or immediately after transcription. The molecular mechanism of RNA splicing has been extensively described, e.g., in Pagani et al., Nature Reviews Genetics 5, 389-396, 2004; Clancy et al., Nature Education 1 (1): 31, 2011; Cheng et al., Molecular Genetics and Genomics 286 (5-6): 395-410, 2014; Taggart et al., Nature Structural & Molecular Biology 19 (7): 719-2, 2012, the contents of each of which are incorporated herein by reference. One skilled in the art is familiar with the mechanism of RNA splicing.

[0110] “Alternative splicing” refers to a regulated process during gene expression that results in a single gene coding for multiple proteins. In this process, particular exons of a gene may be included within or excluded from the final, processed messenger RNA (mRNA) produced from that gene. Consequently, the proteins translated from alternatively spliced mRNAs will contain differences in their amino acid sequence and, often, in their biological functions. Notably, alternative splicing allows the human genome to direct the synthesis of many more proteins than would be expected from its 20,000 protein-coding genes. Alternative splicing is sometimes also termed differential splicing. Alternative splicing occurs as a normal phenomenon in eukaryotes, where it greatly increases the biodiversity of proteins that can be encoded by the genome; in humans, ˜95% of multi-exonic genes are alternatively spliced. There are numerous modes of alternative splicing observed, of which the most common is exon skipping. In this mode, a particular exon may be included in mRNAs under some conditions or in particular tissues, and omitted from the mRNA in others. Abnormal variations in splicing are also implicated in disease; a large proportion of human genetic disorders result from splicing variants. Abnormal splicing variants are also thought to contribute to the development of cancer, and splicing factor genes are frequently mutated in different types of cancer. The regulation of alternative splicing is also described in the art, e.g., in Douglas et al., Annual Review of Biochemistry 72 (1): 291-336, 2003; Pan et al., Nature Genetics 40 (12): 1413-1415, 2008; Martin et al., Nature Reviews 6 (5): 386-398, 2005; Skotheim et al., The international journal of biochemistry & cell biology 39 (7-8): 1432-49, 2007, the entire contents of each of which is incorporated herein by reference.

[0111] A “coding frame” or “open reading frame” refers to a stretch of codons that encodes a polypeptide. Since DNA is interpreted in groups of three nucleotides (codons), a DNA strand has three distinct reading frames. The double helix of a DNA molecule has two anti-parallel strands so, with the two strands having three reading frames each, there are six possible frame translations. A functional protein may be produced when translation proceeds in the correct coding frame. An insertion or a deletion of one or two bases in the open reading frame causes a shift in the coding frame that is also referred to as a “frameshift mutation.” A frameshift mutation typical results in premature translation termination and/or truncated or non-functional protein.

[0112] The term “proteome” refers to the entire set of proteins expressed by a genome, cell, tissue, or organism at a certain time. More specifically, it is the set of expressed proteins in a given type of cell or organism, at a given time, under certain conditions. The term is a blend of proteins and genome. “Proteome-wide” refers to each and every protein in the proteome without any bias.

[0113] The term “genome” refers to the genetic material of a cell or organism. It typically includes DNA (or RNA in the case of RNA viruses). The genome includes both the genes, the coding regions, the noncoding DNA, and the genomes of the mitochondria and chloroplasts. A genome does not typically include genetic material that is artificially introduced into a cell or organism, e.g., a plasmid that is transformed into a bacteria is not a part of the bacterial genome.

[0114] A “programmable DNA-binding protein,” as used herein, refers to DNA binding proteins that can be programmed to navigate to any desired target nucleotide sequence within the genome. To program the DNA-binding protein to bind a desired nucleotide sequence, the DNA binding protein may be modified to change its binding specificity, e.g., zinc finger nuclease (ZFN) or transcription activator-like effector proteins (TALE). ZFNs are artificial restriction enzymes generated by fusing a zinc finger DNA-binding domain to a DNA-cleavage domain. Zinc finger domains can be engineered to target specific desired DNA sequences and this enables zinc-finger nucleases to target unique sequences within complex genomes. Transcription activator-like effector nucleases (TALEN) are restriction enzymes that can be engineered to cut specific sequences of DNA. They are made by fusing a TAL effector DNA-binding domain to a DNA cleavage domain (a nuclease which cuts DNA strands). Transcription activator-like effectors (TALEs) can be engineered to bind practically any desired DNA sequence, so when combined with a nuclease, DNA can be cut at specific locations. The restriction enzymes can be introduced into cells, for use in gene editing or for genome editing in situ, Methods of programming ZFNs and TALEs are familiar to one skilled in the art. For example, such methods are described in Maeder, et al., Mol. Cell 31 (2): 294-301, 2008; Carroll et al., Genetics Society of America, 188 (4): 773-782, 2011; Miller et al., Nature Biotechnology 25 (7): 778-785, 2007; Christian et al., Genetics 186 (2): 757-61, 2008; Li et al., Nucleic Acids Res 39 (1): 359-372, 2010; and Moscou et al., Science 326 (5959): 1501, 2009, the entire contents of each of which are incorporated herein by reference.

[0115] A “guide nucleotide sequence-programmable DNA-binding protein,” as used herein, refers to a protein, a polypeptide, or a domain that is able to bind DNA, and the binding to its target DNA sequence is mediated by a guide nucleotide sequence. Thus, it is appreciated that the guide nucleotide sequence-programmable DNA-binding protein binds to a guide nucleotide sequence. The “guide nucleotide” may be a RNA molecule or a DNA molecule (e.g., a single-stranded DNA or ssDNA molecule) that is complementary to the target sequence and can guide the DNA binding protein to the target sequence. In some embodiments, the guide nucleotide sequence is an oligonucleotide sequence. As such, a guide nucleotide sequence-programmable DNA-binding protein may be a RNA-programmable DNA-binding protein (e.g., a Cas9 protein), or an ssDNA-programmable DNA-binding protein (e.g., an Argonaute protein). “Programmable” means the DNA-binding protein may be programmed to bind any DNA sequence that the guide nucleotide targets.

[0116] In some embodiments, the guide nucleotide sequence exists as a single nucleotide molecule and comprises comprise two domains: (1) a domain that shares homology to a target nucleic acid (e.g., and directs binding of a guide nucleotide sequence-programmable DNA-binding protein to the target); and (2) a domain that binds a guide nucleotide sequence-programmable DNA-binding protein. In some embodiments, the guide nucleotide is a guide RNA (gRNA). In some embodiments, domain (2) of the gRNA corresponds to a sequence known as a tracrRNA, and comprises a stem-loop structure. For example, in some embodiments, domain (2) is identical or homologous to a tracrRNA as provided in Jinek et al., Science 337:816-821(2012), the entire contents of which is incorporated herein by reference. Other examples of gRNAs (e.g., those including domain 2) can be found in U.S. Provisional Patent Application, U.S. Ser. No. 61/874,682, filed Sep. 6, 2013, entitled “Switchable Cas9 Nucleases And Uses Thereof,” and U.S. Provisional Patent Application, U.S. Ser. No. 61/874,746, filed Sep. 6, 2013, entitled “Delivery System For Functional Nucleases,” the entire contents of each are hereby incorporated by reference in their entirety.

[0117] Because the guide nucleotide sequence hybridizes to target DNA sequence, the guide nucleotide sequence-programmable DNA-binding proteins are able to be targeted, in principle, to any sequence specified by the guide nucleotide sequence. Methods of using guide nucleotide sequence-programmable DNA-binding protein, such as Cas9, for site-specific cleavage (e.g., to modify a genome) are known in the art (see e.g., Cong, L. et al. Science 339, 819-823 (2013); Mali, P. et al. Science 339, 823-826 (2013); Hwang, W. Y. et al. Nature biotechnology 31, 227-229 (2013); Jinek, M. et al. eLife 2, e00471 (2013); Dicarlo, J. E. et al. Nucleic acids research (2013); Jiang, W. et al. Nature biotechnology 31, 233-239 (2013); the entire contents of each of which are incorporated herein by reference).

[0118] It is to be understood that any DNA binding domain that is programmable by a guide nucleotide sequence may be used in accordance with the present disclosure. For example, in some embodiments, the guide nucleotide sequence-programmable DNA binding protein may be a Cas9 protein, or a variant thereof. One skilled in the art would understand that the present disclosure is not limited to the use of Cas9 as the guide nucleotide sequence-programmable DNA binding protein, but that other DNA binding proteins that adopt similar mechanism of target sequence binding may also be used.

[0119] As used herein, the term “Cas9” or “Cas9 nuclease” refers to an RNA-guided nuclease comprising a Cas9 protein, a fragment, or a variant thereof. A Cas9 nuclease is also referred to sometimes as a casn1 nuclease or a CRISPR (clustered regularly interspaced short palindromic repeat)-associated nuclease. CRISPR is an adaptive immune system that provides protection against mobile genetic elements (viruses, transposable elements and conjugative plasmids). CRISPR clusters contain spacers, sequences complementary to antecedent mobile elements, and target invading nucleic acids. CRISPR clusters are transcribed and processed into CRISPR RNA (crRNA). In type II CRISPR systems correct processing of pre-crRNA requires a trans-encoded small RNA (tracrRNA), endogenous ribonuclease 3 (rnc) and a Cas9 protein. The tracrRNA serves as a guide for ribonuclease 3-aided processing of pre-crRNA. Subsequently, Cas9/crRNA/tracrRNA endonucleolytically cleaves linear or circular dsDNA target complementary to the spacer. The target strand not complementary to crRNA is first cut endonucleolytically, then trimmed 3′-5′ exonucleolytically. In nature, DNA-binding and cleavage typically requires protein and both RNAs. However, single guide RNAs (“sgRNA”, or simply “gNRA”) can be engineered so as to incorporate aspects of both the crRNA and tracrRNA into a single RNA species. See, e.g., Jinek et al., Science 337:816-821(2012), the entire contents of which is incorporated herein by reference.

[0120] Cas9 nuclease sequences and structures are well known to those of skill in the art (see, e.g., Ferretti et al., Proc. Natl. Acad. Sci. 98:4658-4663(2001); Deltcheva E. et al., Nature 471:602-607(2011); and Jinek et al., Science 337:816-821(2012), the entire contents of each of which are incorporated herein by reference). Cas9 orthologs have been described in various species, including, but not limited to, S. pyogenes and S. thermophilus. Additional suitable Cas9 nucleases and sequences will be apparent to those of skill in the art based on this disclosure, and such Cas9 nucleases and sequences include Cas9 sequences from the organisms and loci disclosed in Chylinski et al., (2013) RNA Biology 10:5, 726-737; the entire contents of which are incorporated herein by reference. In some embodiments, wild type Cas9 corresponds to Cas9 from Streptococcus pyogenes (NCBI Reference Sequence: NC_002737.2, SEQ ID NO: 4 (nucleotide); and Uniport Reference Sequence: Q99ZW2, SEQ ID NO: 1 (amino acid).

(SEQ ID NO: 4)
ATGGATAAGAAATACTCAATAGGCTTAGATATCGGCACAAATAGCGTCGGATGGGCGGTGATCAC
TGATGAATATAAGGTTCCGTCTAAAAAGTTCAAGGTTCTGGGAAATACAGACCGCCACAGTATCA
AAAAAAATCTTATAGGGGCTCTTTTATTTGACAGTGGAGAGACAGCGGAAGCGACTCGTCTCAAA
CGGACAGCTCGTAGAAGGTATACACGTCGGAAGAATCGTATTTGTTATCTACAGGAGATTTTTTCA
AATGAGATGGCGAAAGTAGATGATAGTTTCTTTCATCGACTTGAAGAGTCTTTTTTGGTGGAAGAA
GACAAGAAGCATGAACGTCATCCTATTTTTGGAAATATAGTAGATGAAGTTGCTTATCATGAGAAA
TATCCAACTATCTATCATCTGCGAAAAAAATTGGTAGATTCTACTGATAAAGCGGATTTGCGCTTA
ATCTATTTGGCCTTAGCGCATATGATTAAGTTTCGTGGTCATTTTTTGATTGAGGGAGATTTAAATC
CTGATAATAGTGATGTGGACAAACTATTTATCCAGTTGGTACAAACCTACAATCAATTATTTGAAG
AAAACCCTATTAACGCAAGTGGAGTAGATGCTAAAGCGATTCTTTCTGCACGATTGAGTAAATCAA
GACGATTAGAAAATCTCATTGCTCAGCTCCCCGGTGAGAAGAAAAATGGCTTATTTGGGAATCTCA
TTGCTTTGTCATTGGGTTTGACCCCTAATTTTAAATCAAATTTTGATTTGGCAGAAGATGCTAAATT
ACAGCTTTCAAAAGATACTTACGATGATGATTTAGATAATTTATTGGCGCAAATTGGAGATCAATA
TGCTGATTTGTTTTTGGCAGCTAAGAATTTATCAGATGCTATTTTACTTTCAGATATCCTAAGAGTA
AATACTGAAATAACTAAGGCTCCCCTATCAGCTTCAATGATTAAACGCTACGATGAACATCATCAA
GACTTGACTCTTTTAAAAGCTTTAGTTCGACAACAACTTCCAGAAAAGTATAAAGAAATCTTTTTT
GATCAATCAAAAAACGGATATGCAGGTTATATTGATGGGGGAGCTAGCCAAGAAGAATTTTATAA
ATTTATCAAACCAATTTTAGAAAAAATGGATGGTACTGAGGAATTATTGGTGAAACTAAATCGTGA
AGATTTGCTGCGCAAGCAACGGACCTTTGACAACGGCTCTATTCCCCATCAAATTCACTTGGGTGA
GCTGCATGCTATTTTGAGAAGACAAGAAGACTTTTATCCATTTTTAAAAGACAATCGTGAGAAGAT
TGAAAAAATCTTGACTTTTCGAATTCCTTATTATGTTGGTCCATTGGCGCGTGGCAATAGTCGTTTT
GCATGGATGACTCGGAAGTCTGAAGAAACAATTACCCCATGGAATTTTGAAGAAGTTGTCGATAA
AGGTGCTTCAGCTCAATCATTTATTGAACGCATGACAAACTTTGATAAAAATCTTCCAAATGAAAA
AGTACTACCAAAACATAGTTTGCTTTATGAGTATTTTACGGTTTATAACGAATTGACAAAGGTCAA
ATATGTTACTGAAGGAATGCGAAAACCAGCATTTCTTTCAGGTGAACAGAAGAAAGCCATTGTTG
ATTTACTCTTCAAAACAAATCGAAAAGTAACCGTTAAGCAATTAAAAGAAGATTATTTCAAAAAA
ATAGAATGTTTTGATAGTGTTGAAATTTCAGGAGTTGAAGATAGATTTAATGCTTCATTAGGTACC
TACCATGATTTGCTAAAAATTATTAAAGATAAAGATTTTTTGGATAATGAAGAAAATGAAGATATC
TTAGAGGATATTGTTTTAACATTGACCTTATTTGAAGATAGGGAGATGATTGAGGAAAGACTTAAA
ACATATGCTCACCTCTTTGATGATAAGGTGATGAAACAGCTTAAACGTCGCCGTTATACTGGTTGG
GGACGTTTGTCTCGAAAATTGATTAATGGTATTAGGGATAAGCAATCTGGCAAAACAATATTAGAT
TTTTTGAAATCAGATGGTTTTGCCAATCGCAATTTTATGCAGCTGATCCATGATGATAGTTTGACAT
TTAAAGAAGACATTCAAAAAGCACAAGTGTCTGGACAAGGCGATAGTTTACATGAACATATTGCA
AATTTAGCTGGTAGCCCTGCTATTAAAAAAGGTATTTTACAGACTGTAAAAGTTGTTGATGAATTG
GTCAAAGTAATGGGGCGGCATAAGCCAGAAAATATCGTTATTGAAATGGCACGTGAAAATCAGAC
AACTCAAAAGGGCCAGAAAAATTCGCGAGAGCGTATGAAACGAATCGAAGAAGGTATCAAAGAA
TTAGGAAGTCAGATTCTTAAAGAGCATCCTGTTGAAAATACTCAATTGCAAAATGAAAAGCTCTAT
CTCTATTATCTCCAAAATGGAAGAGACATGTATGTGGACCAAGAATTAGATATTAATCGTTTAAGT
GATTATGATGTCGATCACATTGTTCCACAAAGTTTCCTTAAAGACGATTCAATAGACAATAAGGTC
TTAACGCGTTCTGATAAAAATCGTGGTAAATCGGATAACGTTCCAAGTGAAGAAGTAGTCAAAAA
GATGAAAAACTATTGGAGACAACTTCTAAACGCCAAGTTAATCACTCAACGTAAGTTTGATAATTT
AACGAAAGCTGAACGTGGAGGTTTGAGTGAACTTGATAAAGCTGGTTTTATCAAACGCCAATTGG
TTGAAACTCGCCAAATCACTAAGCATGTGGCACAAATTTTGGATAGTCGCATGAATACTAAATACG
ATGAAAATGATAAACTTATTCGAGAGGTTAAAGTGATTACCTTAAAATCTAAATTAGTTTCTGACT
TCCGAAAAGATTTCCAATTCTATAAAGTACGTGAGATTAACAATTACCATCATGCCCATGATGCGT
ATCTAAATGCCGTCGTTGGAACTGCTTTGATTAAGAAATATCCAAAACTTGAATCGGAGTTTGTCT
ATGGTGATTATAAAGTTTATGATGTTCGTAAAATGATTGCTAAGTCTGAGCAAGAAATAGGCAAA
GCAACCGCAAAATATTTCTTTTACTCTAATATCATGAACTTCTTCAAAACAGAAATTACACTTGCA
AATGGAGAGATTCGCAAACGCCCTCTAATCGAAACTAATGGGGAAACTGGAGAAATTGTCTGGGA
TAAAGGGCGAGATTTTGCCACAGTGCGCAAAGTATTGTCCATGCCCCAAGTCAATATTGTCAAGAA
AACAGAAGTACAGACAGGCGGATTCTCCAAGGAGTCAATTTTACCAAAAAGAAATTCGGACAAGC
TTATTGCTCGTAAAAAAGACTGGGATCCAAAAAAATATGGTGGTTTTGATAGTCCAACGGTAGCTT
ATTCAGTCCTAGTGGTTGCTAAGGTGGAAAAAGGGAAATCGAAGAAGTTAAAATCCGTTAAAGAG
TTACTAGGGATCACAATTATGGAAAGAAGTTCCTTTGAAAAAAATCCGATTGACTTTTTAGAAGCT
AAAGGATATAAGGAAGTTAAAAAAGACTTAATCATTAAACTACCTAAATATAGTCTTTTTGAGTTA
GAAAACGGTCGTAAACGGATGCTGGCTAGTGCCGGAGAATTACAAAAAGGAAATGAGCTGGCTCT
GCCAAGCAAATATGTGAATTTTTTATATTTAGCTAGTCATTATGAAAAGTTGAAGGGTAGTCCAGA
AGATAACGAACAAAAACAATTGTTTGTGGAGCAGCATAAGCATTATTTAGATGAGATTATTGAGC
AAATCAGTGAATTTTCTAAGCGTGTTATTTTAGCAGATGCCAATTTAGATAAAGTTCTTAGTGCAT
ATAACAAACATAGAGACAAACCAATACGTGAACAAGCAGAAAATATTATTCATTTATTTACGTTG
ACGAATCTTGGAGCTCCCGCTGCTTTTAAATATTTTGATACAACAATTGATCGTAAACGATATACG
TCTACAAAAGAAGTTTTAGATGCCACTCTTATCCATCAATCCATCACTGGTCTTTATGAAACACGC
ATTGATTTGAGTCAGCTAGGAGGTGACTGA
(SEQ ID NO: 1)
MDKKYSIGLDIGTNSVGWAVITDEYKVPSKKFKVLGNTDRHSIKKNLIGALLFDSGETAEATRLKRTAR
RRYTRRKNRICYLQEIFSNEMAKVDDSFFHRLEESFLVEEDKKHERHPIFGNIVDEVAYHEKYPTIYHLR
KKLVDSTDKADLRLIYLALAHMIKFRGHFLIEGDLNPDNSDVDKLFIQLVQTYNQLFEENPINASGVDA
KAILSARLSKSRRLENLIAQLPGEKKNGLFGNLIALSLGLTPNFKSNFDLAEDAKLQLSKDTYDDDLDN
LLAQIGDQYADLFLAAKNLSDAILLSDILRVNTEITKAPLSASMIKRYDEHHQDLTLLKALVRQQLPEK
YKEIFFDQSKNGYAGYIDGGASQEEFYKFIKPILEKMDGTEELLVKLNREDLLRKQRTFDNGSIPHQIHL
GELHAILRRQEDFYPFLKDNREKIEKILTFRIPYYVGPLARGNSRFAWMTRKSEETITPWNFEEVVDKGA
SAQSFIERMTNFDKNLPNEKVLPKHSLLYEYFTVYNELTKVKYVTEGMRKPAFLSGEQKKAIVDLLFK
TNRKVTVKQLKEDYFKKIECFDSVEISGVEDRFNASLGTYHDLLKIIKDKDFLDNEENEDILEDIVLTLT
LFEDREMIEERLKTYAHLFDDKVMKQLKRRRYTGWGRLSRKLINGIRDKQSGKTILDFLKSDGFANRN
FMQLIHDDSLTFKEDIQKAQVSGQGDSLHEHIANLAGSPAIKKGILQTVKVVDELVKVMGRHKPENIVI
EMARENQTTQKGQKNSRERMKRIEEGIKELGSQILKEHPVENTQLQNEKLYLYYLQNGRDMYVDQEL
DINRLSDYDVDHIVPOSFLKDDSIDNKVLTRSDKNRGKSDNVPSEEVVKKMKNYWROLLNAKLITQRK
FDNLTKAERGGLSELDKAGFIKRQLVETRQITKHVAQILDSRMNTKYDENDKLIREVKVITLKSKLVSD
FRKDFQFYKVREINNYHHAHDAYLNAVVGTALIKKYPKLESEFVYGDYKVYDVRKMIAKSEQEIGKA
TAKYFFYSNIMNFFKTEITLANGEIRKRPLIETNGETGEIVWDKGRDFATVRKVLSMPQVNIVKKTEVQ
TGGFSKESILPKRNSDKLIARKKDWDPKKYGGFDSPTVAYSVLVVAKVEKGKSKKLKSVKELLGITIME
RSSFEKNPIDFLEAKGYKEVKKDLIIKLPKYSLFELENGRKRMLASAGELQKGNELALPSKYVNFLYLA
SHYEKLKGSPEDNEQKQLFVEQHKHYLDEIIEQISEFSKRVILADANLDKVLSAYNKHRDKPIREQAENI
IHLFTLTNLGAPAAFKYFDTTIDRKRYTSTKEVLDATLIHQSITGLYETRIDLSQLGGD
(single underline: HNH domain; double underline: RuvC domain)

[0121] In some embodiments, wild type Cas9 corresponds to Cas9 from Streptococcus aureus. S. aureus Cas9 wild type (SEQ ID NO: 6)

MKRNYILGLDIGITSVGYGIIDYETRDVIDAGVRLFKEANVENNEGRRSK
RGARRLKRRRRHRIQRVKKLLFDYNLLTDHSELSGINPYEARVKGLSQKL
SEEEFSAALLHLAKRRGVHNVNEVEEDTGNELSTKEQISRNSKALEEKYV
AELQLERLKKDGEVRGSINRFKTSDYVKEAKQLLKVQKAYHQLDQSFIDT
YIDLLETRRTYYEGPGEGSPFGWKDIKEWYEMLMGHCTYFPEELRSVKYA
YNADLYNALNDLNNLVITRDENEKLEYYEKFQIIENVFKQKKKPTLKQIA
KEILVNEEDIKGYRVTSTGKPEFTNLKVYHDIKDITARKEIIENAELLDQ
IAKILTIYQSSEDIQEELTNLNSELTQEEIEQISNLKGYTGTHNLSLKAI
NLILDELWHTNDNQIAIFNRLKLVPKKVDLSQQKEIPTTLVDDFILSPVV
KRSFIQSIKVINAIIKKYGLPNDIIIELAREKNSKDAQKMINEMQKRNRQ
TNERIEEIIRTTGKENAKYLIEKIKLHDMQEGKCLYSLEAIPLEDLLNNP
FNYEVDHIIPRSVSFDNSFNNKVLVKQEENSKKGNRTPFQYLSSSDSKIS
YETFKKHILNLAKGKGRISKTKKEYLLEERDINRFSVQKDFINRNLVDTR
YATRGLMNLLRSYFRVNNLDVKVKSINGGFTSFLRRKWKFKKERNKGYKH
HAEDALIIANADFIFKEWKKLDKAKKVMENQMFEEKQAESMPEIETEQEY
KEIFITPHQIKHIKDFKDYKYSHRVDKKPNRELINDTLYSTRKDDKGNTL
IVNNLNGLYDKDNDKLKKLINKSPEKLLMYHHDPQTYQKLKLIMEQYGDE
KNPLYKYYEETGNYLTKYSKKDNGPVIKKIKYYGNKLNAHLDITDDYPNS
RNKVVKLSLKPYRFDVYLDNGVYKFVTVKNLDVIKKENYYEVNSKCYEEA
KKLKKISNQAEFIASFYNNDLIKINGELYRVIGVNNDLLNRIEVNMIDIT
YREYLENMNDKRPPRIIKTIASKTQSIKKYSTDILGNLYEVKSKKHPQII
KKG

[0122] In some embodiments, wild type Cas9 corresponds to Cas9 from Streptococcus thermophilus.

Streptococcus therrnophilus wild type CRISPR3 Cas9 (St3Cas9)
(SEQ ID NO: 7)
MTKPYSIGLDIGTNSVGWAVITDNYKVPSKKMKVLGNTSKKYIKKNLLGVLLFDSGITAEGRRLKRTA
RRRYTRRRNRILYLQEIFSTEMATLDDAFFQRLDDSFLVPDDKRDSKYPIFGNLVEEKVYHDEFPTIYHL
RKYLADSTKKADLRLVYLALAHMIKYRGHFLIEGEFNSKNNDIQKNFQDFLDTYNAIFESDLSLENSKQ
LEEIVKDKISKLEKKDRILKLFPGEKNSGIFSEFLKLIVGNQADFRKCFNLDEKASLHFSKESYDEDLETL
LGYIGDDYSDVFLKAKKLYDAILLSGFLTVTDNETEAPLSSAMIKRYNEHKEDLALLKEYIRNISLKTYN
EVFKDDTKNGYAGYIDGKTNQEDFYVYLKNLLAEFEGADYFLEKIDREDFLRKQRTFDNGSIPYQIHLQ
EMRAILDKQAKFYPFLAKNKERIEKILTFRIPYYVGPLARGNSDFAWSIRKRNEKITPWNFEDVIDKESS
AEAFINRMTSFDLYLPEEKVLPKHSLLYETFNVYNELTKVRFIAESMRDYQFLDSKQKKDIVRLYFKDK
RKVTDKDIIEYLHAIYGYDGIELKGIEKQFNSSLSTYHDLLNIINDKEFLDDSSNEAIIEEIIHTLTIFEDRE
MIKQRLSKFENIFDKSVLKKLSRRHYTGWGKLSAKLINGIRDEKSGNTILDYLIDDGISNRNFMQLIHDD
ALSFKKKIQKAQIIGDEDKGNIKEVVKSLPGSPAIKKGILQSIKIVDELVKVMGGRKPESIVVEMARENQ
YTNQGKSNSQQRLKRLEKSLKELGSKILKENIPAKLSKIDNNALQNDRLYLYYLQNGKDMYTGDDLDI
DRLSNYDIDHIIPQAFLKDNSIDNKVLVSSASNRGKSDDFPSLEVVKKRKTFWYQLLKSKLISQRKFDNL
TKAERGGLLPEDKAGFIQRQLVETRQITKHVARLLDEKFNNKKDENNRAVRTVKIITLKSTLVSQFRKD
FELYKVREINDFHHAHDAYLNAVIASALLKKYPKLEPEFVYGDYPKYNSFRERKSATEKVYFYSNIMNI
FKKSISLADGRVIERPLIEVNEETGESVWNKESDLATVRRVLSYPQVNVVKKVEEQNHGLDRGKPKGL
FNANLSSKPKPNSNENLVGAKEYLDPKKYGGYAGISNSFAVLVKGTIEKGAKKKITNVLEFQGISILDRI
NYRKDKLNFLLEKGYKDIELIIELPKYSLFELSDGSRRMLASILSTNNKRGEIHKGNQIFLSQKFVKLLYH
AKRIS NTINENHRKYVENHKKEFEELFYYILEFNENYVGAKKNGKLLNSAFQSWQNHSIDELCSSFIGPT
GSERKGLFELTSRGSAADFEFLGVKIPRYRDYTPSSLLKDATLIHQSVTGLYETRIDLAKLGEG
Streptococcus therrnophilus CRISPR1 Cas9 wild type (St1Cas9)
(SEQ ID NO: 8)
MSDLVLGLDIGIGSVGVGILNKVTGEIIHKNSRIFPAAQAENNLVRRTNRQGRRLTRRKKHRRVRLNRL
FEESGLITDFTKISINLNPYQLRVKGLTDELSNEELFIALKNMVKHRGISYLDDASDDGNSSIGDYAQIVK
ENSKQLETKTPGQIQLERYQTYGQLRGDFTVEKDGKKHRLINVFPTSAYRSEALRILQTQQEFNPQITDE
FINRYLEILTGKRKYYHGPGNEKSRTDYGRYRTSGETLDNIFGILIGKCTFYPDEFRAAKASYTAQEFNL
LNDLNNLTVPTETKKLSKEQKNQIINYVKNEKAMGPAKLFKYIAKLLSCDVADIKGYRIDKSGKAEIHT
FEAYRKMKTLETLDIEQMDRETLDKLAYVLTLNTEREGIQEALEHEFADGSFSQKQVDELVQFRKANS
SIFGKGWHNFSVKLMMELIPELYETSEEQMTILTRLGKQKTTSSSNKTKYIDEKLLTEEIYNPVVAKSVR
QAIKIVNAAIKEYGDFDNIVIEMARETNEDDEKKAIQKIQKANKDEKDAAMLKAANQYNGKAELPHSV
FHGHKQLATKIRLWHQQGERCLYTGKTISIHDLINNSNQFEVDHILPLSITFDDSLANKVLVYATANQE
KGQRTPYQALDSMDDAWSFRELKAFVRESKTLSNKKKEYLLTEEDISKFDVRKKFIERNLVDTRYASR
VVLNALQEHFRAHKIDTKVSVVRGQFTSQLRRHWGIEKTRDTYHHHAVDALIIAASSQLNLWKKQKN
TLVSYSEDQLLDIETGELISDDEYKESVFKAPYQHFVDTLKSKEFEDSILFSYQVDSKFNRKISDATIYAT
RQAKVGKDKADETYVLGKIKDIYTQDGYDAFMKIYKKDKSKFLMYRHDPQTFEKVIEPILENYPNKQI
NEKGKEVPCNPFLKYKEEHGYIRKYSKKGNGPEIKSLKYYDSKLGNHIDITPKDSNNKVVLQSVSPWR
ADVYFNKTTGKYEILGLKYADLQFEKGTGTYKISQEKYNDIKKKEGVDSDSEFKFTLYKNDLLLVKDT
ETKEQQLFRFLSRTMPKQKHYVELKPYDKQKFEGGEALIKVLGNVANSGQCKKGLGKSNISIYKVRTD
VLGNQHIIKNEGDKPKLDF

[0123] In some embodiments, the Cas9 domain of any of the fusion proteins provided herein is a Cas9 from archaea (e.g. nanoarchaea), which constitute a domain and kingdom of single-celled prokaryotic microbes. In some embodiments, the Cas9 domain is CasX or CasY, which have been described in, for example, Burstein et al., “New CRISPR-Cas systems from uncultivated microbes.” Cell Res. 2017 Feb. 21. doi: 10.1038/cr.2017.21, which is incorporated herein by reference. Using genome-resolved metagenomics, a number of CRISPR-Cas systems were identified, including the first reported Cas9 in the archaeal domain of life. This divergent Cas9 protein was found in nanoarchaea as part of an active CRISPR-Cas system. In bacteria, two previously unknown systems were discovered, CRISPR-CasX and CRISPR-CasY, which are among the most compact systems yet discovered. In some embodiments, Cas9 refers to CasX, or a variant of CasX. In some embodiments, Cas9 refers to a CasY, or a variant of CasY. It should be appreciated that other RNA-guided DNA binding proteins may be used as a nucleic acid programmable DNA binding protein (napDNAbp) and are within the scope of this disclosure.

[0124] In some embodiments, the Cas9 domain comprises an amino acid sequence that is at least 85%, at least 90%, at least 91%, at least 92%, at least 93%, at least 94%, at least 95%, at least 96%, at least 97%, at least 98%, at least 99%, or at least 99.5% identical to a naturally-occurring CasX or CasY protein. In some embodiments, the Cas9 domain is a naturally-occurring CasX or CasY protein. In some embodiments, the Cas9 domain comprises an amino acid sequence that is at least 85%, at least 90%, at least 91%, at least 92%, at least 93%, at least 94%, at least 95%, at least 96%, at least 97%, at least 98%, at least 99%, or at least 99.5% identical to any one of SEQ ID NOs: 336-337 or 3000. In some embodiments, the Cas9 domain comprises an amino acid sequence of any one SEQ ID NOs: 336-337 or 3000. It should be appreciated that CasX and CasY from other bacterial species may also be used in accordance with the present disclosure.

[0125] In some embodiments, wild-type Cas9 refers to CasX from Sulfolobus islandicus (strain REY15A).

(SEQ ID NO: 338)
MEVPLYNIFGDNYIIQVATEAENSTIYNNKVEIDDEELRNVLNLAYKIAK
NNEDAAAERRGKAKKKKGEEGETTTSNIILPLSGNDKNPWTETLKCYNFP
TTVALSEVFKNFSQVKECEEVSAPSFVKPEFYKFGRSPGMVERTRRVKLE
VEPHYLIMAAAGWVLTRLGKAKVSEGDYVGVNVFTPTRGILYSLIQNVNG
IVPGIKPETAFGLWIARKVVSSVTNPNVSVVSIYTISDAVGQNPTTINGG
FSIDLTKLLEKRDLLSERLEAIARNALSISSNMRERYIVLANYIYEYLTG
SKRLEDLLYFANRDLIMNLNSDDGKVRDLKLISAYVNGELIRGEG

[0126] In some embodiments, wild-type Cas9 refers to CasX from Sulfolobus islandicus (strain REY15A).

(SEQ ID NO: 339)
MEVPLYNIFGDNYIIQVATEAENSTIYNNKVEIDDEELRNVLNLAYKIAK
NNEDAAAERRGKAKKKKGEEGETTTSNIILPLSGNDKNPWTETLKCYNFP
TTVALSEVFKNFSQVKECEEVSAPSFVKPEFYEFGRSPGMVERTRRVKLE
VEPHYLIIAAAGWVLTRLGKAKVSEGDYVGVNVFTPTRGILYSLIQNVNG
IVPGIKPETAFGLWIARKVVSSVTNPNVSVVRIYTISDAVGQNPTTINGG
FSIDLTKLLEKRYLLSERLEAIARNALSISSNMRERYIVLANYIYEYLTG
SKRLEDLLYFANRDLIMNLNSDDGKVRDLKLISAYVNGELIRGEG

[0127] In some embodiments, wild-type Cas9 refers to CasY from a Parcubacteria group bacterium.

CasY (ncbi.nlm.nih.gov/protein/APG80656.1)
>APG80656.1 CRISPR-associated protein CasY
[uncultured Parcubacteria group bacterium]
(SEQ ID NO: 3000)
MSKRHPRISGVKGYRLHAQRLEYTGKSGAMRTIKYPLYSSPSGGRTVPRE
IVSAINDDYVGLYGLSNFDDLYNAEKRNEEKVYSVLDFWYDCVQYGAVFS
YTAPGLLKNVAEVRGGSYELTKTLKGSHLYDELQIDKVIKFLNKKEISRA
NGSLDKLKKDIIDCFKAEYRERHKDQCNKLADDIKNAKKDAGASLGERQK
KLFRDFFGISEQSENDKPSFTNPLNLTCCLLPFDTVNNNRNRGEVLFNKL
KEYAQKLDKNEGSLEMWEYIGIGNSGTAFSNFLGEGFLGRLRENKITELK
KAMMDITDAWRGQEQEEELEKRLRILAALTIKLREPKFDNHWGGYRSDIN
GKLSSWLQNYINQTVKIKEDLKGHKKDLKKAKEMINRFGESDTKEEAVVS
SLLESIEKIVPDDSADDEKPDIPAIAIYRRFLSDGRLTLNRFVQREDVQE
ALIKERLEAEKKKKPKKRKKKSDAEDEKETIDFKELFPHLAKPLKLVPNF
YGDSKRELYKKYKNAAIYTDALWKAVEKIYKSAFSSSLKNSFFDTDFDKD
FFIKRLQKIFSVYRRFNTDKWKPIVKNSFAPYCDIVSLAENEVLYKPKQS
RSRKSAAIDKNRVRLPSTENIAKAGIALARELSVAGFDWKDLLKKEEHEE
YIDLIELHKTALALLLAVTETQLDISALDFVENGTVKDFMKTRDGNLVLE
GRFLEMFSQSIVFSELRGLAGLMSRKEFITRSAIQTMNGKQAELLYIPHE
FQSAKITTPKEMSRAFLDLAPAEFATSLEPESLSEKSLLKLKQMRYYPHY
FGYELTRTGQGIDGGVAENALRLEKSPVKKREIKCKQYKTLGRGQNKIVL
YVRSSYYQTQFLEWFLHRPKNVQTDVAVSGSFLIDEKKVKTRWNYDALTV
ALEPVSGSERVFVSQPFTIFPEKSAEEEGQRYLGIDIGEYGIAYTALEIT
GDSAKILDQNFISDPQLKTLREEVKGLKLDQRRGTFAMPSTKIARIRESL
VHSLRNRIHHLALKHKAKIVYELEVSRFEEGKQKIKKVYATLKKADVYSE
IDADKNLQTTVWGKLAVASEISASYTSQFCGACKKLWRAEMQVDETITTQ
ELIGTVRVIKGGTLIDAIKDFMRPPIFDENDTPFPKYRDFCDKHHISKKM
RGNSCLFICPFCRANADADIQASQTIALLRYVKEEKKVEDYFERFRKLKN
IKVLGQMKKI

[0128] In some embodiments, Cas9 refers to Cas9 from: Corynebacterium ulcerans (NCBI Refs: NC_015683.1, NC_017317.1); Corynebacterium diphtheria (NCBI Refs: NC_016782.1, NC_016786.1); Spiroplasma syrphidicola (NCBI Ref: NC_021284.1); Prevotella intermedia (NCBI Ref: NC_017861.1); Spiroplasma taiwanense (NCBI Ref: NC_021846.1); Streptococcus iniae (NCBI Ref: NC_021314.1); Belliella baltica (NCBI Ref: NC_018010.1); Psychroflexus torquisI (NCBI Ref: NC_018721.1); Listeria innocua (NCBI Ref: NP_472073.1), Campylobacter jejuni (NCBI Ref: YP_002344900.1) or Neisseria. meningitidis (NCBI Ref: YP_002342100.1) or to a Cas9 from any of the organisms listed in Example 1 (SEQ ID NOs: 11-260).

[0129] To be used as in the fusion protein of the present disclosure as the guide nucleotide sequence-programmable DNA binding protein domain, a Cas9 protein needs to be nuclease inactive. A nuclease-inactive Cas9 protein may interchangeably be referred to as a “dCas9” protein (for nuclease-“dead” Cas9). Methods for generating a Cas9 protein (or a fragment thereof) having an inactive DNA cleavage domain are known (See, e.g., Jinek et al., Science. 337:816-821(2012); Qi et al., (2013) Cell. 28; 152(5):1173-83, the entire contents of each of which are incorporated herein by reference). For example, the DNA cleavage domain of Cas9 is known to include two subdomains, the HNH nuclease subdomain and the RuvC1 subdomain. The HNH subdomain cleaves the strand complementary to the gRNA, whereas the RuvC1 subdomain cleaves the non-complementary strand. Mutations within these subdomains can silence the nuclease activity of Cas9. For example, the mutations D10A and H840A completely inactivate the nuclease activity of S. pyogenes Cas9 (Jinek et al., Science. 337:816-821(2012); Qi et al., Cell. 28; 152(5):1173-83 (2013)).

dCas9 (D10A and H840A)
(SEQ ID NO: 2)
MDKKYSIGLAIGTNSVGWAVITDEYKVPSKKFKVEGNTDRHSIKKNLIGALLFDSGETAEATREKRTAR
RRYTRRKNRICYLQEIFSNEMAKVDDSFFHRLEESFLVEEDKKHERHPIFGNIVDEVAYHEKYPTIYHLR
KKLVDSTDKADLRLIYLALAHMIKFRGHFLIEGDLNPDNSDVDKLFIQLVQTYNQLFEENPINASGVDA
KAILSARLSKSRRLENLIAQLPGEKKNGLFGNLIALSLGLTPNFKSNFDLAEDAKLQLSKDTYDDDLDN
LLAQIGDQYADLFLAAKNLSDAILLSDILRVNTEITKAPLSASMIKRYDEHHQDLTLLKALVRQQLPEK
YKEIFFDQSKNGYAGYIDGGASQEEFYKFIKPILEKMDGTEELLVKLNREDLLRKQRTFDNGSIPHQIHL
GELHAILRRQEDFYPFLKDNREKIEKILTFRIPYYVGPLARGNSRFAWMTRKSEETITPWNFEEVVDKGA
SAQSFIERMTNFDKNLPNEKVLPKHSLLYEYFTVYNELTKVKYVTEGMRKPAFLSGEQKKAIVDLLFK
TNRKVTVKQLKEDYFKKIECFDSVEISGVEDRFNASLGTYHDLLKIIKDKDFLDNEENEDILEDIVLTLT
LFEDREMIEERLKTYAHLFDDKVMKQLKRRRYTGWGRLSRKLINGIRDKQSGKTILDFLKSDGFANRN
FMQLIHDDSLTFKEDIQKAQVSGQGDSLHEHIANLAGSPAIKKGILQTVKVVDELVKVMGRHKPENIVI
EMARENQTTQKGQKNSRERMKRIEEGIKELGSQILKEHPVENTQLQNEKLYLYYLQNGRDMYVDQEL
DINRLSDYDVDAIVPOSFLKDDSIDNKVLTRSDKNRGKSDNVPSEEVVKKMKNYWROLLNAKLITQRK
FDNLTKAERGGLSELDKAGFIKRQLVETRQITKHVAQILDSRMNTKYDENDKLIREVKVITLKSKLVSD
FRKDFQFYKVREINNYHHAHDAYLNAVVGTALIKKYPKLESEFVYGDYKVYDVRKMIAKSEQEIGKA
TAKYFFYSNIMNFFKTEITLANGEIRKRPLIETNGETGEIVWDKGRDFATVRKVLSMPQVNIVKKTEVQ
TGGFSKESILPKRNSDKLIARKKDWDPKKYGGFDSPTVAYSVLVVAKVEKGKSKKLKSVKELLGITIME
RSSFEKNPIDFLEAKGYKEVKKDLIIKLPKYSLFELENGRKRMLASAGELQKGNELALPSKYVNFLYLA
SHYEKLKGSPEDNEQKQLFVEQHKHYLDEIIEQISEFSKRVILADANLDKVLSAYNKHRDKPIREQAENI
IHLFTLTNLGAPAAFKYFDTTIDRKRYTSTKEVLDATLIHQSITGLYETRIDLSQLGGD
(single underline: HNH domain; double underline: RuvC domain)

[0130] The dCas9 of the present disclosure encompasses completely inactive Cas9 or partially inactive Cas9. For example, the dCas9 may have one of the two nuclease domain inactivated, while the other nuclease domain remains active. Such a partially active Cas9 may also be referred to as a Cas9 nickase, due to its ability to cleave one strand of the targeted DNA sequence. The Cas9 nickase suitable for use in accordance with the present disclosure has an active HNH domain and an inactive RuvC domain and is able to cleave only the strand of the target DNA that is bound by the sgRNA. The Cas9 nickase of the present disclosure may comprise mutations that inactivate the RuvC domain, e.g., a D10A mutation. It is to be understood that any mutation that inactivates the RuvC domain may be included in a Cas9 nickase, e.g., insertion, deletion, or single or multiple amino acid substitution in the RuvC domain. In a Cas9 nickase described herein, while the RuvC domain is inactivated, the HNH domain remains activate. Thus, while the Cas9 nickase may comprise mutations other than those that inactivate the RuvC domain (e.g., D10A), those mutations do not affect the activity of the HNH domain. In a non-limiting Cas9 nickase example, the histidine at position 840 remains unchanged. The sequence of an exemplary Cas9 nickase suitable for the present disclosure is provided below.

Cas9 Nickase (D10A)
(SEQ ID NO: 3)
MDKKYSIGLAIGTNSVGWAVITDEYKVPSKKFKVLGNTDRHSIKKNLIGALLFDSGETAEATRLKRTAR
RRYTRRKNRICYLQEIFSNEMAKVDDSFFHRLEESFLVEEDKKHERHPIFGNIVDEVAYHEKYPTIYHLR
KKLVDSTDKADLRLIYLALAHMIKFRGHFLIEGDLNPDNSDVDKLFIQLVQTYNQLFEENPINASGVDA
KAILSARLSKSRRLENLIAQLPGEKKNGLFGNLIALSLGLTPNFKSNFDLAEDAKLQLSKDTYDDDLDN
LLAQIGDQYADLFLAAKNLSDAILLSDILRVNTEITKAPLSASMIKRYDEHHQDLTLLKALVRQQLPEK
YKEIFFDQSKNGYAGYIDGGASQEEFYKFIKPILEKMDGTEELLVKLNREDLLRKQRTFDNGSIPHQIHL
GELHAILRRQEDFYPFLKDNREKIEKILTFRIPYYVGPLARGNSRFAWMTRKSEETITPWNFEEVVDKGA
SAQSFIERMTNFDKNLPNEKVLPKHSLLYEYFTVYNELTKVKYVTEGMRKPAFLSGEQKKAIVDLLFK
TNRKVTVKQLKEDYFKKIECFDSVEISGVEDRFNASLGTYHDLLKIIKDKDFLDNEENEDILEDIVLTLT
LFEDREMIEERLKTYAHLFDDKVMKQLKRRRYTGWGRLSRKLINGIRDKQSGKTILDFLKSDGFANRN
FMQLIHDDSLTFKEDIQKAQVSGQGDSLHEHIANLAGSPAIKKGILQTVKVVDELVKVMGRHKPENIVI
EMARENQTTQKGQKNSRERMKRIEEGIKELGSQILKEHPVENTQLQNEKLYLYYLQNGRDMYVDQEL
DINRLSDYDVDHIVPOSFLKDDSIDNKVLTRSDKNRGKSDNVPSEEVVKKMKNYWROLLNAKLITORK
FDNLTKAERGGLSELDKAGFIKRQLVETRQITKHVAQILDSRMNTKYDENDKLIREVKVITLKSKLVSD
FRKDFQFYKVREINNYHHAHDAYLNAVVGTALIKKYPKLESEFVYGDYKVYDVRKMIAKSEQEIGKA
TAKYFFYSNIMNFFKTEITLANGEIRKRPLIETNGETGEIVWDKGRDFATVRKVLSMPQVNIVKKTEVQ
TGGFSKESILPKRNSDKLIARKKDWDPKKYGGFDSPTVAYSVLVVAKVEKGKSKKLKSVKELLGITIME
RSSFEKNPIDFLEAKGYKEVKKDLIIKLPKYSLFELENGRKRMLASAGELQKGNELALPSKYVNFLYLA
SHYEKLKGSPEDNEQKQLFVEQHKHYLDEIIEQISEFSKRVILADANLDKVLSAYNKHRDKPIREQAENI
IHLFTLTNLGAPAAFKYFDTTIDRKRYTSTKEVLDATLIHQSITGLYETRIDLSQLGGD
(single underline: HNH domain; double underline: RuvC domain)
S. aureus Cas9 Nickase (D10A)
(SEQ ID NO: 5)
MKRNYILGLAIGITSVGYGIIDYETRDVIDAGVRLFKEANVENNEGRRSKRGARRLKRRRRHRIQRVKK
LLFDYNLLTDHSELSGINPYEARVKGLSQKLSEEEFSAALLHLAKRRGVHNVNEVEEDTGNELSTKEQI
SRNSKALEEKYVAELQLERLKKDGEVRGSINRFKTSDYVKEAKQLLKVQKAYHQLDQSFIDTYIDLLE
TRRTYYEGPGEGSPFGWKDIKEWYEMLMGHCTYFPEELRSVKYAYNADLYNALNDLNNLVITRDENE
KLEYYEKFQIIENVFKQKKKPTLKQIAKEILVNEEDIKGYRVTSTGKPEFTNLKVYHDIKDITARKEIIEN
AELLDQIAKILTIYQSSEDIQEELTNLNSELTQEEIEQISNLKGYTGTHNLSLKAINLILDELWHTNDNQIA
IFNRLKLVPKKVDLSQQKEIPTTLVDDFILSPVVKRSFIQSIKVINAIIKKYGLPNDIIIELAREKNSKDAQK
MINEMQKRNRQTNERIEEIIRTTGKENAKYLIEKIKLHDMQEGKCLYSLEAIPLEDLLNNPFNYEVDHIIP
RSVSFDNSFNNKVLVKQEENSKKGNRTPFQYLSSSDSKISYETFKKHILNLAKGKGRISKTKKEYLLEER
DINRFSVQKDFINRNLVDTRYATRGLMNLLRSYFRVNNLDVKVKSINGGFTSFLRRKWKFKKERNKGY
KHHAEDALIIANADFIFKEWKKLDKAKKVMENQMFEEKQAESMPEIETEQEYKEIFITPHQIKHIKDFK
DYKYSHRVDKKPNRELINDTLYSTRKDDKGNTLIVNNLNGLYDKDNDKLKKLINKSPEKLLMYHHDP
QTYQKLKLIMEQYGDEKNPLYKYYEETGNYLTKYSKKDNGPVIKKIKYYGNKLNAHLDITDDYPNSR
NKVVKLSLKPYRFDVYLDNGVYKFVTVKNLDVIKKENYYEVNSKCYEEAKKLKKISNQAEFIASFYNN
DLIKINGELYRVIGVNNDLLNRIEVNMIDITYREYLENMNDKRPPRIIKTIASKTQSIKKYSTDILGNLYE
VKSKKHPQIIKKG

[0131] It is appreciated that when the term “dCas9” or “nuclease-inactive Cas9” is used herein, it refers to Cas9 variants that are inactive in both HNH and RuvC domains as well as Cas9 nickases. For example, the dCas9 used in the present disclosure may include the amino acid sequence set forth in SEQ ID NO: 2 or SEQ ID NO: 3. In some embodiments, the dCas9 may comprise other mutations that inactivate RuvC or HNH domain. Additional suitable mutations that inactivate Cas9 will be apparent to those of skill in the art based on this disclosure and knowledge in the field, and are within the scope of this disclosure. Such additional exemplary suitable nuclease-inactive Cas9 domains include, but are not limited to, D839A and/or N863A (See, e.g., Prashant et al., Nature Biotechnology. 2013; 31(9): 833-838, the entire contents of which are incorporated herein by reference), or K603R (See, e.g., Chavez et al., Nature Methods 12, 326-328, 2015, the entire contents of which is incorporated herein by reference). The term Cas9, dCas9, or Cas9 variant also encompasses Cas9, dCas9, or Cas9 variant from any organism. Also appreciated is that dCas9, Cas9 nickase, or other appropriate Cas9 variants from any organisms may be used in accordance with the present disclosure.

[0132] A “deaminase” refers to an enzyme that catalyzes the removal of an amine group from a molecule, or deamination. In some embodiments, the deaminase is a cytidine deaminase, catalyzing the hydrolytic deamination of cytidine or deoxycytidine to uridine or deoxyuridine, respectively. In some embodiments, the deaminase is a cytosine deaminase, catalyzing the hydrolytic deamination of cytosine to uracil (e.g., in RNA) or thymine (e.g., in DNA). In some embodiments, the deaminase is a naturally-occurring deaminase from an organism, such as a human, chimpanzee, gorilla, monkey, cow, dog, rat, or mouse. In some embodiments, the deaminase is a variant of a naturally-occurring deaminase from an organism, that does not occur in nature. For example, in some embodiments, the deaminase or deaminase domain is at least 50%, at least 55%, at least 60%, at least 65%, at least 70%, at least 75% at least 80%, at least 85%, at least 90%, at least 95%, at least 96%, at least 97%, at least 98%, at least 99%, or at least 99.5% identical to a naturally-occurring deaminase from an organism.

[0133] A “cytosine deaminase” refers to an enzyme that catalyzes the chemical reaction “cytosine+H₂O→uracil+NH₃” or “5-methyl-cytosine+H₂O→thymine+NH3.” As it may be apparent from the reaction formula, such chemical reactions result in a C to U/T nucleobase change. In the context of a gene, such nucleotide change, or mutation, may in turn lead to an amino acid residue change in the protein, which may affect the protein function, e.g., loss-of-function or gain-of-function.

[0134] One exemplary suitable class of cytosine deaminases is the apolipoprotein B mRNA-editing complex (APOBEC) family of cytosine deaminases encompassing eleven proteins that serve to initiate mutagenesis in a controlled and beneficial manner. The apolipoprotein B editing complex 3 (APOBEC3) enzyme provides protection to human cells against a certain HIV-1 strain via the deamination of cytosines in reverse-transcribed viral ssDNA. These cytosine deaminases all require a Zn²⁺-coordinating motif (His-X-Glu-X₂₃₋₂₆-Pro-Cys-X₂₋₄-Cys; SEQ ID NO: 820) and bound water molecule for catalytic activity. The Glu residue acts to activate the water molecule to a zinc hydroxide for nucleophilic attack in the deamination reaction. Each family member preferentially deaminates at its own particular “hotspot”, ranging from WRC (W is A or T, R is A or G) for hAID, to TTC for hAPOBEC3F. A recent crystal structure of the catalytic domain of APOBEC3G revealed a secondary structure comprised of a five-stranded β-sheet core flanked by six α-helices, which is believed to be conserved across the entire family. The active center loops have been shown to be responsible for both ssDNA binding and in determining “hotspot” identity. Overexpression of these enzymes has been linked to genomic instability and cancer, thus highlighting the importance of sequence-specific targeting. Another suitable cytosine deaminase is the activation-induced cytidine deaminase (AID), which is responsible for the maturation of antibodies by converting cytosines in ssDNA to uracils in a transcription-dependent, strand-biased fashion.

[0135] Herein, a “nucleobase editor” refers to to a protein that edits a nucleotide base. “Edit” refers to the conversion of one nucleotide base to another. For example, the nucleobase may target C bases in a nucleic acid sequence and convert the C to T base. In some embodiments, the C to T editing is carried out by a deaminase, e.g., a cytosine deaminase. Other types of base conversions are also contemplated. In some embodiments, the nucleobase editor comprises a DNA binding domain that directs it to a target sequence.

[0136] As such, a base editor may be a cytosine deaminase-dCas9 fusion protein. In some embodiments, the base editor may be a deaminase-dCas9-UGI fusion protein. In some embodiments, the base editor may be a APOBEC1-dCas9-UGI fusion protein. In some embodiments, the base editor may be APOBEC1-Cas9 nickase-UGI fusion protein. In some embodiments, the base editor may be APOBEC1-dCpf1-UGI fusion protein. In some embodiments, the base editor may be APOBEC1-dNgAgo-UGI fusion protein. In some embodiments, the base editor may be a pmCDA1-Cas9 nickase-UGI fusion protein. In some embodiments, the base editor may be a human APOBEC3G-Cas9 nickase UGI fusion protein. In some embodiments, the base editor may comprise a second UGI domain. Non-limiting exemplary sequences of the nucleobase editors described herein are provided in Example 1, SEQ ID NOs: 293-302, 1071, and 1084. Such nucleobase editors and methods of using them for genome editing have been described in the art, e.g., in U.S. Pat. No. 9,068,179, US Patent Application Publications US 2015/0166980, US 2015/0166981, US 2015/0166982, US20150166984, and US20150165054, and US Provisional Applications, U.S. Ser. No. 62/245,828, filed Oct. 23, 2015; 62/279,346, filed Jan. 15, 2016; 62/311,763, filed Mar. 22, 2016; 62/322,178, filed Apr. 13, 2016, 62/357,352, filed Jun. 30, 2016, 62/370,700, filed Aug. 3, 2016; 62/398,490, filed Sep. 22, 2016; 62/408,686, filed Oct. 14, 2016; PCT Application PCT/US2016/058344, filed Oct. 22, 2016, U.S. patent application Ser. No. 15/311,852, filed Oct. 22, 2016; Komor et al. (2017) Improved Base Excision Repair Inhibition and Bateriophage Mu Gam Protein Yields C:G-to-T:A base editors with higher efficiency and product purity. Sci Adv, 3: eaao4774; and in Komor et al., Nature, Programmable editing of a target base in genomic DNA without double-stranded DNA cleavage, 533, 420-424 (2016), the entire contents of each of which are incorporated herein by reference.

[0137] The term “target site” or “target sequence” refers to a sequence within a nucleic acid molecule (e.g., a DNA molecule) that is deaminated by the fusion protein provided herein. In some embodiments, the target sequence is a polynucleotide (e.g., a DNA), wherein the polynucleotide comprises a coding strand and a complementary strand. The meaning of a “coding strand” and “complementary strand” is the common meaning of the terms in the art. In some embodiments, the target sequence is a sequence in the genome of a mammal. In some embodiments, the target sequence is a sequence in the genome of a human. The term “target codon” refers to the amino acid codon that is edited by the base editor and converted to a different codon via deamination of C base. In some embodiments, the target codon is edited in the coding strand. In some embodiments, the target codon is edited in the complementary strand.

[0138] The term “linker,” as used herein, refers to a chemical group or a molecule linking two molecules or moieties, e.g., two domains of a fusion protein, such as, for example, a nuclease-inactive Cas9 domain and a nucleic acid editing domain (e.g., a deaminase domain). Typically, the linker is positioned between, or flanked by, two groups, molecules, or other moieties and connected to each one via a covalent bond, thus connecting the two. In some embodiments, the linker is an amino acid or a plurality of amino acids (e.g., a peptide or protein). In some embodiments, the linker is an organic molecule, group, polymer, or chemical moiety. In some embodiments, the linker is 2-100 amino acids in length, for example, 2, 3, 4, 5, 6, 7, 8, 9, 10, 11, 12, 13, 14, 15, 16, 17, 18, 19, 20, 21, 22, 23, 24, 25, 26, 27, 28, 29, 30, 30-35, 35-40, 40-45, 45-50, 50-60, 60-70, 70-80, 80-90, 90-100, 100-150, or 150-200 amino acids in length. Longer or shorter linkers are also contemplated.

[0139] The term “mutation,” as used herein, refers to a substitution of a residue within a sequence, e.g., a nucleic acid or amino acid sequence, with another residue, or a deletion or insertion of one or more residues within a sequence. Mutations are typically described herein by identifying the original residue followed by the position of the residue within the sequence and by the identity of the newly substituted residue. Various methods for making the amino acid substitutions (mutations) provided herein are well known in the art, and are provided by, for example, Green and Sambrook, Molecular Cloning: A Laboratory Manual (4^{th} ed., Cold Spring Harbor Laboratory Press, Cold Spring Harbor, N.Y. (2012)).

[0140] The terms “nucleic acid” and “nucleic acid molecule,” as used herein, refer to a compound comprising a nucleobase and an acidic moiety, e.g., a nucleoside, a nucleotide, or a polymer of nucleotides. Typically, polymeric nucleic acids, e.g., nucleic acid molecules comprising three or more nucleotides are linear molecules, in which adjacent nucleotides are linked to each other via a phosphodiester linkage. In some embodiments, “nucleic acid” refers to individual nucleic acid residues (e.g. nucleotides and/or nucleosides). In some embodiments, “nucleic acid” refers to an oligonucleotide chain comprising three or more individual nucleotide residues. As used herein, the terms “oligonucleotide” and “polynucleotide” can be used interchangeably to refer to a polymer of nucleotides (e.g., a string of at least three nucleotides). In some embodiments, “nucleic acid” encompasses RNA as well as single and/or double-stranded DNA. Nucleic acids may be naturally occurring, for example, in the context of a genome, a transcript, an mRNA, tRNA, rRNA, siRNA, snRNA, a plasmid, cosmid, chromosome, chromatid, or other naturally occurring nucleic acid molecule. On the other hand, a nucleic acid molecule may be a non-naturally occurring molecule, e.g., a recombinant DNA or RNA, an artificial chromosome, an engineered genome, or fragment thereof, or a synthetic DNA, RNA, DNA/RNA hybrid, or including non-naturally occurring nucleotides or nucleosides. Furthermore, the terms “nucleic acid,” “DNA,” “RNA,” and/or similar terms include nucleic acid analogs, e.g., analogs having other than a phosphodiester backbone. Nucleic acids can be purified from natural sources, produced using recombinant expression systems and optionally purified, chemically synthesized, etc. Where appropriate, e.g., in the case of chemically synthesized molecules, nucleic acids can comprise nucleoside analogs such as analogs having chemically modified bases or sugars, and backbone modifications. A nucleic acid sequence is presented in the 5′ to 3′ direction unless otherwise indicated. In some embodiments, a nucleic acid is or comprises natural nucleosides (e.g. adenosine, thymidine, guanosine, cytidine, uridine, deoxyadenosine, deoxythymidine, deoxyguanosine, and deoxycytidine); nucleoside analogs (e.g., 2-aminoadenosine, 2-thiothymidine, inosine, pyrrolo-pyrimidine, 3-methyl adenosine, 5-methylcytidine, 2-aminoadenosine, C5-bromouridine, C5-fluorouridine, C5-iodouridine, C5-propynyl-uridine, C5-propynyl-cytidine, C5-methylcytidine, 2-aminoadenosine, 7-deazaadenosine, 7-deazaguanosine, 8-oxoadenosine, 8-oxoguanosine, O(6)-methylguanine, and 2-thiocytidine); chemically modified bases; biologically modified bases (e.g., methylated bases); intercalated bases; modified sugars (e.g., 2′-fluororibose, ribose, 2′-deoxyribose, arabinose, and hexose); and/or modified phosphate groups (e.g., phosphorothioates and 5′-N-phosphoramidite linkages).

[0141] The terms “protein,” “peptide,” and “polypeptide” are used interchangeably herein, and refer to a polymer of amino acid residues linked together by peptide (amide) bonds. The terms refer to a protein, peptide, or polypeptide of any size, structure, or function. Typically, a protein, peptide, or polypeptide will be at least three amino acids long. A protein, peptide, or polypeptide may refer to an individual protein or a collection of proteins. One or more of the amino acids in a protein, peptide, or polypeptide may be modified, for example, by the addition of a chemical entity such as a carbohydrate group, a hydroxyl group, a phosphate group, a farnesyl group, an isofarnesyl group, a fatty acid group, a linker for conjugation, functionalization, or other modification, etc. A protein, peptide, or polypeptide may also be a single molecule or may be a multi-molecular complex. A protein, peptide, or polypeptide may be just a fragment of a naturally occurring protein or peptide. A protein, peptide, or polypeptide may be naturally occurring, recombinant, or synthetic, or any combination thereof. The term “fusion protein” as used herein refers to a hybrid polypeptide which comprises protein domains from at least two different proteins. One protein may be located at the amino-terminal (N-terminal) portion of the fusion protein or at the carboxy-terminal (C-terminal) protein thus forming an “amino-terminal fusion protein” or a “carboxy-terminal fusion protein,” respectively. A protein may comprise different domains, for example, a nucleic acid binding domain (e.g., the gRNA binding domain of Cas9 that directs the binding of the protein to a target site) and a nucleic acid cleavage domain or a catalytic domain of a nucleic-acid editing protein. In some embodiments, a protein comprises a proteinaceous part, e.g., an amino acid sequence constituting a nucleic acid binding domain, and an organic compound, e.g., a compound that can act as a nucleic acid cleavage agent. In some embodiments, a protein is in a complex with, or is in association with, a nucleic acid, e.g., RNA. Any of the proteins provided herein may be produced by any method known in the art.

[0142] For example, the proteins provided herein may be produced via recombinant protein expression and purification, which is especially suited for fusion proteins comprising a peptide linker. Methods for recombinant protein expression and purification are well known, and include those described by Green and Sambrook, Molecular Cloning: A Laboratory Manual (4^{th} ed., Cold Spring Harbor Laboratory Press, Cold Spring Harbor, N.Y. (2012)), the entire contents of which are incorporated herein by reference.

[0143] The term “subject,” as used herein, refers to an individual organism, for example, an individual mammal. In some embodiments, the subject is a human. In some embodiments, the subject is a non-human mammal. In some embodiments, the subject is a non-human primate. In some embodiments, the subject is a rodent. In some embodiments, the subject is a sheep, a goat, a cattle, a cat, or a dog. In some embodiments, the subject is a vertebrate, an amphibian, a reptile, a fish, an insect, a fly, or a nematode. In some embodiments, the subject is a research animal. In some embodiments, the subject is genetically engineered, e.g., a genetically engineered non-human subject. The subject may be of either sex and at any stage of development.

[0144] The term “recombinant” as used herein in the context of proteins or nucleic acids refers to proteins or nucleic acids that do not occur in nature, but are the product of human engineering. For example, in some embodiments, a recombinant protein or nucleic acid molecule comprises an amino acid or nucleotide sequence that comprises at least one, at least two, at least three, at least four, at least five, at least six, or at least seven mutations as compared to any naturally occurring sequence.

### DETAILED DESCRIPTION OF CERTAIN EMBODIMENTS OF THE INVENTION

[0145] The immune system is critical in preventing the outgrowth of cancers, and “immunosurveillance” exists to provide immunological resistance against cancer development (e.g., as described in Old et al., Annu Rev Med 1964; 15: 167-186; Burnet et al., Prog Exp Tumor Res 1970; 13: 1-27; and Graziano et al., Cancer Treat Res 2005; 123: 89-111, each of which is incorporated herein by reference).

[0146] Despite the presence of immunosurveillance, cancers can develop in apparently immunocompetent animals and humans, due to the ability of cancer cells to evade immunosurveillance (e.g., as described in Hanahan et al., Cell 2000; 100: 57-70 and Zitvogel et al., Nat Rev Immunol 2006; 6: 715-727, each of which in incorporated herein by reference). The evasion of cancer cells from immunosurveillance occurs via various well-characterized mechanisms, including induction of T-cell tolerance by autochthonous tumors (e.g., as described in Willimsky et al., Nature 2005; 437: 141-146, incorporated herein by reference), cancer immunoediting (e.g., as described in Dunn et al., Nat Immunol 2002; 3: 991-998, incorporated herein by reference), and development of an immune suppressive cancer microenvironment (e.g., as described in Zou et al., Nat Rev Cancer 2005; 5: 263-274, incorporated herein by reference). Therapeutic cancer vaccines or adoptive immunotherapy are being developed and tested as potential approaches to strengthen the immune responses after tumor arise in order to slow their progression and prevent their recurrence. Immunotherapeutic approaches, e.g., cancer vaccines have been described but are only partially successful (e.g., as described in Finn et al., Nat Rev Immunol 2003; 3: 630-641, incorporated herein by reference).

[0147] Described herein are systems, methods, compositions, and kits for producing immunogenic peptides derived from tumor specific antigens (e.g., heteroclitic epitopes or cryptic epitopes) that may be used as cancer vaccines in vivo or ex vivo. Targeted mutations are introduced into tumor-specific antigens using a gene editing agent, e.g., a nucleobase editor comprising a programmable DNA binding domain (e.g., a catalytically-inactive Cas9 or Cas9 nickase) fused to a cytosine deaminase, to generate altered versions of peptides arising from the tumor-specific antigens (heteroclitic epitopes) or peptides arising from normally untranslated regions of the tumor-specific antigen genes (cryptic peptides). The heteroclitic peptides or cryptic peptides may be generated in vivo in a subject (e.g., a subject who has cancer) and presented to the adaptive immune system via the MHC class I or MHC class II pathway, which in turn induces a strong adaptive immune response, e.g., T cell response and B cell response. Such an adaptive immune response is antigen specific and is effective in reducing tumor growth and preventing metastasis.

[0148] The advantage of the cancer vaccines of the present disclosure is that the vaccine (e.g., antigenic peptides derived from tumor-specific antigens) is generated from the genome and the proteome of the malignant cells in vivo and is highly personalized. The cancer vaccines described herein are also highly cancer-specific and do not induce unwanted immune response against “self,” since the immunogenic epitopes are derived from tumor-specific antigens. Further, the adaptive immune response induced by the cancer vaccine described herein confer “memory” to the immune system, promoting the immune system to efficiently recognize “neoepitopes” generated due to the highly mutagenic nature of the cancer genome, thus preventing metastasis and facilitate remission. To enhance the efficacy of the cancer vaccines described herein, combination therapies using an immune checkpoint inhibitor in conjunction with the cancer vaccine is also contemplated, aiming to enhance the tumor antigen specific immune response.

[0149] The methods of producing endogenous cancer vaccines in vivo are enabled by the targeted nucleobase editing technology described herein. Such base editing technology is described in the art, e.g., in U.S. Pat. No. 9,068,179, US Patent Application Publications US 2015/0166980, US 2015/0166981, US 2015/0166982, US20150166984, and US20150165054, and US Provisional Applications, U.S. Ser. No. 62/245,828, filed Oct. 23, 2015; 62/279,346, filed Jan. 15, 2016; 62/311,763, filed Mar. 22, 2016; 62/322,178, filed Apr. 13, 2016, 62/357,352, filed Jun. 30, 2016, 62/370,700, filed Aug. 3, 2016; 62/398,490, filed Sep. 22, 2016; 62/408,686, filed Oct. 14, 2016; PCT Application PCT/US2016/058344, filed Oct. 22, 2016, U.S. patent application Ser. No. 15/311,852, filed Oct. 22, 2016; and in Komor et al., Nature, Programmable editing of a target base in genomic DNA without double-stranded DNA cleavage, 533, 420-424 (2016), the entire contents of each of which are incorporated herein by reference.

### Immunogenic Peptides or Epitopes

[0150] Some aspects of the present disclosure provide immunogenic peptides or epitopes derived from tumor-specific antigens and how these peptides or epitopes elicit tumor-specific immune response. A large number of proteins that specifically express in tumor cells or are upregulated in tumor cells have been identified (Hassane et al., Holland-Frei Cancer Medicine. 6th edition). The known tumor specific antigens are classified into different classes.

[0151] a) Cancer-testis antigens: The first TAAs ever identified that can be recognized by T cells belong to this class, which was originally called cancer-testis (CT) antigens because of the expression of its members in histologically different human tumors and, among normal tissues, only in spermatocytes/spermatogonia of testis and, occasionally, in placenta. Since the cells of testis do not express class I and II HLA molecules, these antigens cannot be recognized by T cells in normal tissues and can therefore be considered as immunologically tumor-specific. Well-known examples of CT antigens are the MAGE family members or NY-ESO-1.

[0152] b) Differentiation antigens: These TAAs are shared between tumors and normal tissue from which the tumor arose; most are found in melanomas and normal melanocytes. Many of these melanocyte lineage-related proteins are involved in the biosynthesis of melanin and are therefore not tumor specific but nevertheless are widely used for cancer immunotherapy. Examples include, but are not limited to, tyrosinase and Melan-A/MART-1 for melanoma, and PSA for prostate cancer.

[0153] c) Overexpressed TAAs: Genes encoding widely expressed TSAs have been detected in histologically different types of tumors as well as in many normal tissues, generally with lower expression levels. It is possible that many of the epitopes processed and potentially presented by normal tissues are below the threshold level for T-cell recognition, while their overexpression in tumor cells can trigger an anticancer response by breaking previously established tolerance. Examples of this class of TAAs are Her-2/neu, Survivin, Telomerase and WT1.

[0154] d) Tumor specific antigens: These unique TAAs arise from mutations of normal genes (such as β-catenin, CDK4, etc.). Some of these molecular changes are associated with neoplastic transformation and/or progression. Tumor specific antigens are generally able to induce strong immune responses without bearing the risk for autoimmune reactions against normal tissues. On the other hand, these TAAs are in most cases only relevant to the exact tumor on which they were identified and are usually not shared between many individual tumors.

[0155] e) TAAs arising from abnormal post-translational modifications: Such TSAs may arise from proteins which are neither specific nor overexpressed in tumors but nevertheless become tumor associated by posttranslational processes primarily active in tumors. Examples for this class arise from altered glycosylation patterns leading to novel epitopes in tumors (e.g., MUC1).

[0156] f) Oncoviral proteins: These TSAs are viral proteins that may play a critical role in the oncogenic process, and because they are foreign (not of human origin), they can evoke a T-cell response. Examples of such proteins are the human papilloma type 16 virus proteins, E6 and E7, which are expressed in cervical carcinoma.

[0157] TAAs are a starting point for the development of a tumor vaccine. The methods for identifying and characterizing the TAAs are based on the use of cytoxic T lymphocytes (CTL) that can be isolated from patients or healthy subjects, or they are based on the generation of differential transcription profiles or differential peptide expression patterns between tumors and normal tissues.

[0158] In some embodiments, the tumor-specific antigen is expressed in a broad range of different types of cancers. In some embodiments, the tumor-specific antigen is expressed only in one or a few types of cancers. The anti-cancer immune response described herein is antigen-specific. As such, an immune response induced by a tumor-specific antigen is specific to cancer types where the said antigen is expressed. Non-limiting, exemplary tumor-specific antigens that may be edited to generate immunogenic epitopes are provided in Tables 1-3. It is appreciated that the examples are for illustration purpose only, and the methods described herein may be applied to any tumor-specific antigen.

[0159] In some embodiments, the immunogenic peptide or epitope is a portion of the tumor-specific antigen. For example, the immunogenic peptide or epitope may be a portion of the tumor-specific antigen that is 5-40 amino acids long. In some embodiments, the immunogenic peptide or epitope is 5, 6, 7, 8, 9, 10, 11, 12, 13, 14, 15, 16, 17, 18, 19, 20, 21, 22, 23, 24, 25, 26, 27, 28, 29, 30, 31, 32, 33, 34, 35, 36, 37, 38, 39, or 40 amino acids long. In some embodiments, the immunogenic peptide or epitope comprises modifications, e.g., amino acid substitutions (also termed “heteroclitic epitopes”), as compared to the native sequence in the tumor specific antigen. In some embodiments, the immunogenic peptide or epitope comprises more than one amino acid substitutions (e.g., 2, 3, 4, 5, or more) compared to the native sequence of the tumor-specific antigen it is derived from. In some embodiments, a heteroclitic peptide or epitope may be at least 60%, at least 70%, at least 80%, at least 90%, at least 98%, or at least 99% identical to the native sequence that it is derived from. In some embodiments, a heteroclitic peptide or epitope is 60%, 65%, 70%, 75%, 80%, 85%, 90%, 95%, 98%, or 99% identical to the native sequence that it is derived from.

[0160] In some embodiments, a heteroclitic peptide or epitope is more immunogenic than a peptide of its native sequence. For example, a heteroclitic epitope may be at least 30% more immunogenic (i.e., induces a stronger immune response) than its corresponding native peptide. In some embodiments, a heteroclitic epitope may be at least 30%, at least 40%, at least 50%, at least 60%, at least 70%, at least 80%, at least 90%, at least 100%, at least 2-fold, at least 3-fold, at least 4-fold, at least 5-fold, at least 6-fold, at least 7-fold, at least 8-fold, at least 9-fold, at least 10-fold, at least 20-fold, at least 30-fold, at least 40-fold, at least 50-fold, at least 60-fold, at least 70-fold, at least 80-fold, at least 90-fold, at least 100-fold, or more immunogenic than its corresponding native peptide.

[0161] In some embodiments, the immunogenic peptide or epitope is a cryptic peptide or epitope, e.g., generated from translation of a non-coding region of the tumor specific antigen gene or translation of a different reading frame of a coding region of the tumor specific antigen. A cryptic peptide or epitope may be more immunogenic (i.e., induces a stronger immune response) than any native peptide derived from the tumor associated antigen. For example, a cryptic peptide or epitope may be at least 30% more immunogenic than any native peptide derived from the tumor associated antigen. In some embodiments, a cryptic peptide or epitope may be at least 30%, at least 40%, at least 50%, at least 60%, at least 70%, at least 80%, at least 90%, at least 100%, at least 2-fold, at least 3-fold, at least 4-fold, at least 5-fold, at least 6-fold, at least 7-fold, at least 8-fold, at least 9-fold, at least 10-fold, at least 20-fold, at least 30-fold, at least 40-fold, at least 50-fold, at least 60-fold, at least 70-fold, at least 80-fold, at least 90-fold, at least 100-fold, or more immunogenic than any native peptide derived from the tumor associated antigen. One skilled in the art is familiar with how to assess the immune response induced by an antigen, e.g., measuring antibody titers.

[0162] Tumor specific antigens from which antigenic epitopes (e.g., heteroclitic epitopes and cryptic epitopes) may be derived are provided in Tables 1-3. (HLA—human leukocyte antigen type)

TABLE 1
Tumor associated antigen-Differentiation

| | | | HLA | | SEQ | |
|---|---|---|---|---|---|---|
| Gene/ | | | frequency | | ID | |
| protein | Tumor | HLA | (%) | Peptide | NO | Position |
| CEA | gut | A2 | 44 | YLSGANLNL | 340 | 605-613 |
| | carcinoma | A2 | 44 | IMIGVLVGV | 341 | 691-699 |
| | | A2 | 44 | GVLVGVALI | 342 | 694-702 |
| | | A2 | 44 | LLTFWNPPT | 343 | 24-33 |
| | | A3 | 22 | HLFGYSWYK | 344 | 61-69 |
| | | A24 | 20 | QYSWFVNGTF | 345 | 268-277 |
| | | A24 | 20 | TYACFVSNL | 346 | 652-660 |
| | | DR3 | 21 | AYVCGIQNSVSANRS | 347 | 568-582 |
| | | DR4 | 24 | DTGFYTLHVIKSDLVNEEA | 348 | 116-140 |
| | | DR4 | 24 | TGQFRV | | |
| | | | | YSWRINGIPQQHTQV | 349 | 625-639 |
| | | DR7 | 25 | TYYRPGVNLSLSC | 350 | 425-437 |
| | | DR7 | 25 | EIIYPNASLLIQN | 351 | 99-111 |
| | | DR9 | 3 | YACFVSNLATGRNNS | 352 | 653-667 |
| | | DR11 | 25 | LWWVNNQSLPVSP | 353 | 177-189, |
| | | | | | | 355-367 |
| | | DR13 | 19 | LWWVNNQSLPVSP | 354 | 177-189, |
| | | | | | | 355-367 |
| | | DR14 | 6 | LWWVNNQSLPVSP | 355 | 177-189, |
| | | | | | | 355-367 |
| | | DR14 | 6 | EIIYPNASLLIQN | 356 | 99-111 |
| | | DR14 | 6 | NSIVKSITVSASG | 357 | 666-678 |
| gp100/ | melanoma | A2 | 44 | KTWGQYWQV | 358 | 154-162 |
| Pme117 | | A2 | 44 | (A)MLGTHTMEV | 359 | 177(8)-186 |
| | | A2 | 44 | ITDQVPFSV | 360 | 209-217 |
| | | A2 | 44 | YLEPGPVTA | 361 | 280-288 |
| | | A2 | 44 | LLDGTATLRL | 362 | 457-466 |
| | | A2 | 44 | VLYRYGSFSV | 363 | 476-485 |
| | | A2 | 44 | SLADTNSLAV | 364 | 570-579 |
| | | A2 | 44 | RLMKQDFSV | 365 | 619-627 |
| | | A2 | 44 | RLPRIFCSC | 366 | 639-647 |
| | | A3 | 22 | LIYRRRLMK | 367 | 614-622 |
| | | A3 | 22 | ALLAVGATK | 368 | 17-25 |
| | | A3 | 22 | IALNFPGSQK | 369 | 86-95 |
| | | A3 | 22 | RSYVPLAHR | 370 | 195-202 |
| | | | | | | and |
| | | | | | | 191 or 192 |
| | | A3 | 22 | ALNFPGSQK | 371 | 87-95 |
| | | A11 | 13 | ALNFPGSQK | 372 | 87-95 |
| | | A24 | 20 | VYFFLPDHL | 373 | intron 4 |
| | | A32 | 8 | RTKQLYPEW | 374 | 40-42 |
| | | | | | | and |
| | | | | | | 47-52 |
| | | A68 | 8 | HTMEVTVYHR | 375 | 182-191 |
| | | B7 | 17 | SSPGCQPPA | 376 | 529-537 |
| | | B35 | 20 | VPLDCVLYRY | 377 | 471-480 |
| | | B35 | 20 | LPHSSSHWL | 378 | 630-638 |
| | | Cw8 | — | SNDGPTLI | 379 | 71-78 |
| | | DQ6 | 63 | GRAMLGTHTMEVTVY | 380 | 175-189 |
| | | DR4 | 24 | WNRQLYPEWTEAQRLD | 381 | 44-59 |
| | | DR7 | 25 | TTEWVETTARELPIPEPE | 382 | 420-437 |
| | | DR7 | 25 | TGRAMLGTHTMEVTVYH | 383 | 174-190 |
| | | DR53 | 49 | GRAMLGTHTMEVTVY | 384 | 175-189 |
| mamma- | breast | A3 | 22 | PLLENVISK | 385 | 23-31 |
| globin-A | cancer | | | | | |
| Melan-A/ | melanoma | A2 | 44 | (E)AAGIGILTV | 386 | 26(27)-35 |
| MART-1 | | A2 | 44 | ILTVILGVL | 387 | 32-40 |
| | | B35 | 20 | EAAGIGILTV | 388 | 26-35 |
| | | B45 | 2 | AEEAAGIGIL(T) | 389 | 24-33(34) |
| | | Cw7 | 41 | RNGYRALMDKS | 390 | 51-61 |
| | | DPS | 3 | YTTAEEAAGIGILTVILGVL | 391 | 21-50 |
| | | | | LLIGCWYCRR | | |
| | | DQ6 | 63 | EEAAGIGILTVI | 392 | 25-36 |
| | | DR1 | 18 | AAGIGILTVILGVL | 393 | 27-40 |
| | | DR1 | 18 | APPAYEKLpSAEQf | 394 | 100-111 |
| | | DR3 | 21 | EEAAGIGILTVI | 395 | 25-36 |
| | | DR4 | 24 | RNGYRALMDKSLHVGTQC | 396 | 51-73 |
| | | | | ALTRR | | |
| | | DR11 | 25 | MPREDAHFIYGYPKKGHGH | 397 | 1-20 |
| | | | | S | | |
| | | DR52 | 41 | KNCEPVVPNAPPAYEKLSA | 398 | 91-110 |
| | | | | E | | |
| NY-BR-1 | breastA2 | | 44 | SLSKILDTV | 399 | 904-912 |
| | cancer | | | | | |
| ERBB2 | breast | A2 | 44 | IVWELMTFGA | 400 | 911-921 |
| | cancer | | | | | |
| OA1 | melanoma | A24 | 20 | LYSACFWWL | 401 | 126-134 |
| PAP | prostate | A2 | 44 | FLFLLFFWL | 402 | 18-26 |
| | cancer | A2 | 44 | TLMSAMTNL | 403 | 112-120 |
| | | A2 | 44 | ALDVYNGLL | 404 | 299-307 |
| PSA | prostate | A2 | 44 | FLTPKKLQCV | 405 | 165-174 |
| | carcinoma | A2 | 44 | VISNDVCAQV | 406 | 178-187 |
| RAB38/ | melanoma | A2 | 44 | VLHWDPETV | 407 | 50-58 |
| NY-MEL-1 | | | | | | |
| TRP-1/ | melanoma | A31 | 5 | MSLQRQFLR | 408 | alt. ORF |
| gp75 | | DR4 | 24 | ISPNSVFSQWRVVCDSLED | 409 | 277-297 |
| | | | | YD | | |
| | | DR15 | 20 | SLPYWNFATG | 410 | 245-254 |
| | | DR17 | 21 | SQWRVVCDSLEDYDT | 411 | 284-298 |
| TRP-2 | melanoma | A2 | 44 | SVYDFFVWL | 412 | 180-188 |
| | | A2 | 44 | TLDSQVMSL | 413 | 360-368 |
| | | A31 | 5 | LLGPGRPYR | 414 | 197-205 |
| | | A33 | 5 | LLGPGRPYR | 415 | 197-205 |
| | | Cw8 | — | ANDPIFVVL | 416 | 387-395 |
| | | DR3 | 21 | QCTEVRADTRPWSGP | 417 | 60-74 |
| | | DR15 | 20 | ALPYWNFATG | 418 | 241-250 |
| tyrosinase | melanoma | A1 | 26 | KCDICTDEY | 419 | 243-251 |
| | | A1 | 26 | SSDYVIPIGTY | 420 | 146-156 |
| | | A2 | 44 | MLLAVLYCL | 421 | 1-9 |
| | | A2 | 44 | CLLWSFQTSA | 422 | 8-17 |
| | | A2 | 44 | YMDGTMSQV | 423 | 369-377 |
| | | A24 | 20 | AFLPWHRLF | 424 | 206-214 |
| | | A24 | 20 | IYMDGTADFSF | 425 | 368-373 |
| | | | | | | and |
| | | | | | | 336-340e |
| | | A26 | 8 | QCSGNFMGF | 426 | 90-98 |
| | | B35 | 20 | TPRLPSSADVEF | 427 | 309-320 |
| | | B35 | 20 | LPSSADVEF | 428 | 312-320 |
| | | B38 | 5 | LHHAFVDSIF | 429 | 388-397 |
| | | B44 | 21 | SEIWRDIDFd | 430 | 192-200 |
| | | DR4 | 24 | QNILLSNAPLGPQFP | 431 | 56-70 |
| | | DR4 | 24 | SYLQDSDPDSFQD | 432 | 450-462 |
| | | DR15 | 20 | FLLHHAFVDSIFEQWLQRH | 433 | 386-406 |
| | | | | RP | | |
| WT1 | testis, | Al | 26 | TSEKRPFMCAY | 434 | 317-327 |
| | ovary, | A24 | 20 | CMTWNQMNL | 435 | 235-243 |
| | bone | DP5 | 3 | LSHLQMHSRKH | 436 | 337-347 |
| | marrow, | DP5 | 3 | KRYFKLSHLQMHSRKH | 437 | 332-347 |
| | spleen | DR4 | 24 | KRYFKLSHLQMHSRKH | 438 | 332-347 |
| CD33 | leukemia | A2 | 44 | AIISGDSPV | 439 | 65-73 |

TABLE 2
Tumor specific antigen-Tumor specific

| | | HLA | | SEQ | |
|---|---|---|---|---|---|
| | | frequency | | ID | |
| Gene/protein | HLA | (%) | Peptide | NO | Position |
| BAGE-1 | Cw16 | 7 | AARAVFLAL | 440 | 1-10 |
| D393-CD20n | DR4 | 24 | KPLFRRMSSLELVIA | 441 | 28-42 |
| Cyclin-A1 | A2 | 44 | FLDRFLSCM | 442 | 227-235 |
| | A2 | 44 | SLIAAAAFCLA | 443 | 341-351 |
| GAGE-1,2,8 | Cw6 | 18 | YRPRPRRY | 444 | 9-16 |
| GAGE- | A29 | 6 | YYWPRPRRY | 445 | 10-18 |
| 3,4,5,6,7 | | | | | |
| GnTVf | A2 | 44 | VLPDVFIRC(V) | 446 | intron |
| HERV-K-MEL | A2 | 44 | MLAVISCAV | 447 | 1-9 |
| KK-LC-1 | B15 | 13 | RQKRILVNL | 448 | 76-84 |
| KM-HN-1 | A24 | 20 | NYNNFYRFL | 449 | 196-204 |
| | A24 | 20 | EYSKECLKEF | 450 | 499-508 |
| | A24 | 20 | EYLSLSDKI | 451 | 770-778 |
| LAGE-1 | A2 | 44 | MLMAQEALAFL | 452 | alt. ORF |
| | | | | | (1-11) |
| | A2 | 44 | SLLMWITQC | 453 | 157-165 |
| | A31 | 5 | LAAQERRVPR | 454 | alt. ORF |
| | | | | | (18-27) |
| | A68 | 8 | ELVRRILSR | 455 | 103-111 |
| | B7 | 17 | APRGVRMAV | 456 | alt. ORF |
| | | | | | (46-54) |
| | DP4 | 75 | SLLMWITQCFLPVF | 457 | 157-170 |
| | DR3 | 21 | QGAMLAAQERRVPRAAEVPR | 458 | alt. ORF |
| | | | | | (14-33) |
| | DR4 | 24 | AADHRQLQLSISSCLQQL | 459 | 139-156 |
| | DR11 | 25 | CLSRRPWKRSWSAGSCPGMPHL | 460 | alt. |
| | | | | | ORFT |
| | | | | | (81-102) |
| | DR12 | 5 | CLSRRPWKRSWSAGSCPGMPHL | 461 | alt. |
| | | | | | ORFT |
| | | | | | (81-102) |
| | DR13 | 19 | ILSRDAAPLPRPG | 462 | 108-120 |
| | DR15 | 20 | AGATGGRGPRGAGA | 463 | 37-50 |
| LY6K | A24 | 20 | RYCNLEGPPI | 464 | 119-128 |
| | DPS | 3 | KWTEPYCVIAAVKIFPRFFMVAKQ | 465 | 61-84 |
| | DR15 | 20 | KCCKIRYCNLEGPPINSSVF | 466 | 114-133 |
| MAGE-A1 | A1 | 26 | EADPTGHSY | 467 | 161-169 |
| | A2 | 44 | KVLEYVIKV | 468 | 278-286 |
| | A3 | 22 | SLFRAVITK | 469 | 96-104 |
| | A68 | 8 | EVYDGREHSA | 470 | 222-231 |
| | B7 | 17 | RVRFFFPSL | 471 | 289-298 |
| | B35 | 20 | EADPTGHSY | 472 | 161-169 |
| | B37 | 3 | REPVTKAEML | 473 | 120-129 |
| | B44 | 21 | KEADPTGHSY | 474 | 160-169 |
| | B53 | 2 | DPARYEFLW | 475 | 258-266 |
| | B57 | 8 | ITKKVADLVGF | 476 | 102-112 |
| | Cw2 | 10 | SAFPTTINF | 477 | 62-70 |
| | Cw3 | 17 | SAYGEPRKL | 478 | 230-238 |
| | Cw7 | 41 | RVRFFFPSL | 479 | 289-298 |
| | Cw16 | 7 | SAYGEPRKL | 480 | 230-238 |
| | DP4 | 75 | TSCILESLFRAVITK | 481 | 90-104 |
| | DP4 | 75 | PRALAETSYVKVLEY | 482 | 268-282 |
| | DR13 | 19 | FLLLKYRAREPVTKAE | 483 | 112-127 |
| | DR15 | 20 | EYVIKVSARVRF | 484 | 281-292 |
| MAGE-A2 | A2 | 44 | YLQLVFGIEV | 485 | 157-166 |
| | A24 | 20 | EYLQLVFGI | 486 | 156-164 |
| | B37 | 3 | REPVTKAEML | 487 | 127-136 |
| | Cw7 | 41 | EGDCAPEEK | 488 | 212-220 |
| | DR13 | 19 | LLKYRAREPVTKAE | 489 | 121-134 |
| MAGE-A3 | A1 | 26 | EVDPIGHLY | 490 | 168-176 |
| | A2 | 44 | FLWGPRALVd | 491 | 271-279 |
| | A2 | 44 | KVAELVHFL | 492 | 112-120 |
| | A24 | 20 | TFPDLESEF | 493 | 97-105 |
| | A24 | 20 | VAELVHFLL | 494 | 113-121 |
| | B18 | 6 | MEVDPIGHLY | 495 | 167-176 |
| | B35 | 20 | EVDPIGHLY | 496 | 168-176 |
| | B37 | 3 | REPVTKAEML | 497 | 127-136 |
| | B40 | 6 | AELVHFLLL | 498 | 114-122 |
| | B44 | 21 | MEVDPIGHLY | 499 | 167-176 |
| | B52 | 5 | WQYFFPVIF | 500 | 143-151 |
| | Cw7 | 41 | EGDCAPEEK | 501 | 212-220 |
| | DP4 | 75 | KKLLTQHFVQENYLEY | 502 | 243-258 |
| | DP4 | 75 | RKVAELVHFLLLKYR | 503 | 111-125 |
| | DQ6 | 63 | KKLLTQHFVQENYLEY | 504 | 243-258 |
| | DR1 | 18 | ACYEFLWGPRALVETS | 505 | 267-282 |
| | DR4 | 24 | RKVAELVHFLLLKYR | 506 | 111-125 |
| | DR4 | 24 | VIFSKASSSLQL | 507 | 149-160 |
| | DR7 | 25 | VIFSKASSSLQL | 508 | 149-160 |
| | DR7 | 25 | VFGIELMEVDPIGHL | 509 | 161-175 |
| | DR11 | 25 | GDNQIMPKAGLLIIV | 510 | 191-205 |
| | DR11 | 25 | TSYVKVLHHMVKISG | 511 | 281-295 |
| | DR13 | 19 | RKVAELVHFLLLKYRA | 512 | 111-126 |
| | DR13 | 19 | FLLLKYRAREPVTKAE | 513 | 119-134 |
| MAGE-A4 | A1 | 26 | EVDPASNTY | 514 | 169-177 |
| | A2 | 44 | GVYDGREHTV | 515 | 230-239 |
| | A24 | 20 | NYKRCFPVI | 516 | 143-151 |
| | B37 | 3 | SESLKMIF | 517 | 156-163 |
| MAGE-A6 | A34 | 1 | MVKISGGPR | 518 | 290-298 |
| | B35 | 20 | EVDPIGHVY | 519 | 168-176 |
| | B37 | 3 | REPVTKAEML | 520 | 127-136 |
| | Cw7 | 41 | EGDCAPEEK | 521 | 212-220 |
| | Cw16 | 7 | ISGGPRISY | 522 | 293-301 |
| | DR13 | 19 | LLKYRAREPVTKAE | 523 | 121-134 |
| MAGE-A9 | A2 | 44 | ALSVMGVYV | 524 | 223-231 |
| MAGE-A10 | A2 | 44 | GLYDGMEHLI | 525 | 254-262 |
| | B53 | 2 | DPARYEFLW | 526 | 290-298 |
| MAGE-A12 m | A2g | 44 | FLWGPRALV | 527 | 271-279 |
| | Cw7 | 41 | VRIGHLYIL | 528 | 170-178 |
| | Cw7 | 41 | EGDCAPEEK | 529 | 212-220 |
| | DP4 | 75 | REPFTKAEMLGSVIR | 530 | 127-141 |
| | DR13 | 19 | AELVHFLLLKYRAR | 531 | 114-127 |
| MAGE-C1 | A2 | 44 | ILFGISLREV | 532 | 959-968 |
| | A2 | 44 | KVVEFLAML | 533 | 1083-1091 |
| | DQ6 | 63 | SSALLSIFQSSPE | 534 | 137-149 |
| | DQ6 | 63 | SFSYTLLSL | 535 | 450-458 |
| | DR15 | 20 | VSSFFSYTL | 536 | 779-787 |
| MAGE-C2 | A2 | 44 | LLFGLALIEV | 537 | 191-200 |
| | A2 | 44 | ALKDVEERV | 538 | 336-344 |
| | B44 | 21 | SESIKKKVL | 539 | 307-315 |
| | B57 | 8 | ASSTLYLVF | 540 | 42-50 |
| | DR15 | 20 | SSTLYLVFSPSSFST | 541 | 43-57 |
| mucink | | | PDTRPAPGSTAPPAHGVTSA | 542 | |
| NA88-A | B13 | 6 | QGQHFLQKV | 543 | |
| | A2 | 44 | SLLMWITQC | 544 | 157-165 |
| NY-ESO-1/ | A2 | 44 | MLMAQEALAFL | 545 | alt. ORF |
| LAGE-2 | | | | | (1-11) |
| | A24 | 20 | YLAMPFATPME | 546 | 91-101 |
| | A31 | 5 | ASGPGGGAPR | 547 | 53-62 |
| | A31 | 5 | LAAQERRVPR | 548 | alt. ORF |
| | | | | | (18-27) |
| | A68 | 8 | TVSGNILTIR | 549 | 127-136 |
| | B7 | 17 | APRGPHGGAASGL | 550 | 60-72 |
| | B35 | 20 | MPFATPMEAEL | 551 | 94-104 |
| | B49 | | KEFTVSGNILTI | 552 | 124-135 |
| | B51 | 12 | MPFATPMEA | 553 | 94-102 |
| | B52 | 5 | FATPMEAEL | 554 | 96-104 |
| | C12 | 12 | FATPMEAELAR | 555 | 96-106 |
| | Cw3 | 17 | LAMPFATPM | 556 | 92-100 |
| | Cw6 | 18 | ARGPESRLL | 557 | 80-88 |
| | DP4 | 75 | SLLMWITQCFLPVF | 558 | 157-170 |
| | DP4 | 75 | LLEFYLAMPFATPMEAELARRSLA | 559 | 87-111 |
| | | | Q | | |
| | DR1 | 18 | LLEFYLAMPFATPMEAELARRSLA | 560 | 87-111 |
| | | | Q | | |
| | DR1 | 18 | EFYLAMPFATPM | 561 | 89-100 |
| | DR1 | 18 | PGVLLKEFTVSGNILTIRLTAADHR | 562 | 119-143 |
| | DR2 | 25 | RLLEFYLAMPFA | 563 | 86-97 |
| | DR3 | 21 | QGAMLAAQERRVPRAAEVPR | 564 | alt. ORF |
| | | | | | (14-33) |
| | DR4 | 24 | PFATPMEAELARR | 565 | 95-107 |
| | DR4 | 24 | PGVLLKEFTVSGNILTIRLT | 566 | 119-138 |
| | DR4 | 24 | VLLKEFTVSG | 567 | 121-130 |
| | DR4 | 24 | AADHRQLQLSISSCLQQL | 568 | 139-156 |
| | DR4 | 24 | LLEFYLAMPFATPMEAELARRSLA | 569 | 87-111 |
| | | | Q | | |
| | DR52b | 25 | LKEFTVSGNILTIRL | 570 | 123-137 |
| | DR7 | 25 | PGVLLKEFTVSGNILTIRLTAADHR | 571 | 119-143 |
| | DR7 | 25 | LLEFYLAMPFATPMEAELARRSLA | 572 | 87-111 |
| | | | Q | | |
| | DR8 | 4 | KEFTVSGNILT | 573 | 124-134 |
| | DR9 | 3 | LLEFYLAMPFATPM | 574 | 87-100 |
| | DR15 | 20 | AGATGGRGPRGAGA | 575 | 37-50 |
| SAGE | A24 | 20 | LYATVIHDI | 576 | 715-723 |
| Sp17 | A1 | 26 | ILDSSEEDK | 577 | 103-111 |
| SSX-2 | A2 | 44 | KASEKIFYV | 578 | 41-49 |
| | DP1 | 14 | EKIQKAFDDIAKYFSK | 579 | 19-34 |
| | DR1 | 18 | FGRLQGISPKI | 580 | 101-111 |
| | DR3 | 21 | WEKMKASEKIFYVYMKRK | 581 | 37-54 |
| | DR4 | 24 | KIFYVYMKRKYEAMT | 582 | 45-59 |
| | DR11 | 25 | KIFYVYMKRKYEAM | 583 | 45-58 |
| SSX-4 | DP10 | 2 | INKTSGPKRGKHAWTHRLRE | 584 | 151-170 |
| | DR3 | 21 | YFSKKEWEKMKSSEKIVYVY | 585 | 31-50 |
| | DR8 | 4 | MKLNYEVMTKLGFKVTLPPF | 586 | 51-70 |
| | DR8 | 4 | KHAWTHRLRERKQLVVYEEI | 587 | 161-180 |
| | DR11 | 25 | LGFKVTLPPFMRSKRAADFH | 588 | 61-80 |
| | DR15 | 20 | KSSEKIVYVYMKLNYEVMTK | 589 | 41-60 |
| | DR52 | 41 | KHAWTHRLRERKQLVVYEEI | 590 | 161-180 |
| survivin/ | A2 | 44 | ELTLGEFLKL | 591 | 96-106 |
| BIRC5 | A24 | 20 | AYACNTSTL | 592 | intron B2 |
| TAG-1 | A2 | 44 | SLGWLFLLL | 593 | 78-86 |
| | B8 | 14 | LSRLSNRLL | 594 | 42-50 |
| TAG-2 | B8 | 14 | LSRLSNRLL | 595 | 42-50 |
| TRAG-3 | DR1 | 18 | CEFHACWPAFTVLGE | 596 | 34-48 |
| | DR4 | 24 | CEFHACWPAFTVLGE | 597 | 34-48 |
| | DR7 | 25 | CEFHACWPAFTVLGE | 598 | 34-48 |
| TRP2-INT2g | A68 | 8 | EVISCKLIKR | 599 | intron 2 |
| XAGE-1b/ | A2 | 44 | RQKKIRIQL | 600 | 21-29 |
| GAGED2a | DR4 | 24 | HLGSRQKKIRIQLRSQ | 601 | 17-32 |
| | DR9 | 3 | CATWKVICKSCISQTPG | 602 | 33-49 |
| BCR-ABL | A2 | 44 | SSKALORPV | 603 | 926-934 |
| (b3a2) | B8 | 14 | GFKQSSKAL | 604 | 922-930 |
| | DR4 | 24 | ATGFKQSSKALORPVAS | 605 | 920-936 |
| | DR9 | 3 | ATGFKQSSKALORPVAS | 606 | 920-936 |

TABLE 3
Overexpressed tumor specific antigen

| | | | HLA | | SEQ | |
|---|---|---|---|---|---|---|
| Gene/ | Normal tissue | | Freq | | ID | |
| Protein | expression | HLAa | (%) | Peptide | NO | Position |
| adipophilin | adipocytes, | A2 | 44 | SVASTITGV | 607 | 129-137 |
| | macrophages | | | | | |
| AIM-2 | ubiquitous | A1 | 26 | RSDSGQQARY | 608 | intron |
| | (low level) | | | | | |
| ALDH1A1 | mucosa, | A2 | 44 | LLYKLADLI | 609 | 88-96 |
| | keratinocytes | | | | | |
| BCLX (L) | ubiquitous | A2 | 44 | YLNDHLEPWI | 610 | 173-182 |
| | (low level) | | | | | |
| BING-4 | ubiquitous | A2 | 44 | CQWGRLWQL | 611 | ORF2 |
| | (low level) | | | | | |
| CALCA | thyroid | A2 | 44 | VLLQAGSLHA | 612 | 16-25 |
| CD45 | proliferating cells, | A24 | 20 | KFLDALISL | 613 | 556-564 |
| | testis, multiple | | | | | |
| | tissues (low level) | | | | | |
| CD274 | multiple tissues | A2 | 44 | LLNAFTVTV | 614 | 15-23 |
| | (lung, heart, | | | | | |
| | dendritic cells, | | | | | |
| | etc.) and | | | | | |
| | induced by IFN-γ | | | | | |
| CPSF | ubiquitous | A2 | 44 | KVHPVIWSL | 615 | 250-258 |
| | (low level) | A2 | 44 | LMLQNALTTM | 616 | 1360-1369 |
| cyclin D1 | ubiquitous | A2 | 44 | LLGATCMFV | 617 | 101-109 |
| | (low level) | DR4 | 24 | NPPSMVAAGSVVAAV | 618 | 198-212 |
| DKK1 | testis, prostate, | A2 | 44 | ALGGHPLLGV | 619 | 20-29 |
| | mesenchymal stem | | | | | |
| | cells | | | | | |
| ENAH (hMena) | breast, prostate | A2 | 44 | TMNGSKSPV | 620 | 502-510 |
| | stroma and | | | | | |
| | epithelium of | | | | | |
| | colon-rectum, | | | | | |
| | pancreas, | | | | | |
| | endometrium | | | | | |
| EpCAM | epithelial cells | A24 | 20 | RYQLDPKFI | 621 | 173-181 |
| EphA3 | many | DR11 | 25 | DVTFNIICKKCG | 622 | 356-367 |
| EZH2 | ubiquitous | A2 | 44 | FMVEDETVL | 623 | 120-128 |
| | (low level) | A2 | 44 | FINDEIFVEL | 624 | 165-174 |
| | | A24 | 20 | KYDCFLHPF | 625 | 291-299 |
| | | A24 | 20 | KYVGIEREM | 626 | 735-743 |
| FGF5 | brain, kidney | A3 | 22 | NTYASPRFKF | 627 | 172-176 |
| | | | | | | and |
| | | | | | | 217-220 |
| glypican-3 | placental and | A2 | 44 | FVGEFFTDV | 628 | 144-152 |
| | multiple tissues | A24 | 20 | EYILSLEEL | 629 | 298-306 |
| G250/MN/ | stomach, liver, | A2 | 44 | HLSTAFARV | 630 | 254-262 |
| CAIX | pancreas | | | | | |
| HER-2/neu | ubiquitous | A2 | 44 | KIFGSLAFL | 631 | 369-377 |
| | (low level) | A2 | 44 | IISAVVGIL | 632 | 654-662 |
| | | A2 | 44 | ALCRWGLLL | 633 | 5-13 |
| | | A2 | 44 | ILHNGAYSL | 634 | 435-443 |
| | | A2 | 44 | RLLQETELV | 635 | 689-697 |
| | | A2 | 44 | VVLGVVFGI | 636 | 665-673 |
| | | A2 | 44 | YMIMVKCWMI | 637 | 952-961 |
| | | A2 | 44 | HLYQGCQVV | 638 | 48-56 |
| | | A2 | 44 | YLVPQQGFFC | 639 | 1023-1032 |
| | | A2 | 44 | PLQPEQLQV | 640 | 391-399 |
| | | A2 | 44 | TLEEITGYL | 641 | 402-410 |
| | | A2 | 44 | ALIHHNTHL | 642 | 466-474 |
| | | A2 | 44 | PLTSIISAV | 643 | 650-658 |
| | | A3 | 22 | VLRENTSPK | 644 | 754-762 |
| | | A24 | 20 | TYLPTNASL | 645 | 63-71 |
| HLA-DOB | B lymphocytes, | A2 | 44 | FLLGLIFLL | 646 | 232-240 |
| | monocytes, blood | | | | | |
| | cells, | | | | | |
| | adrenals, . . . | | | | | |
| Hepsin | kidney, liver, | A2 | 44 | SLLSGDWVL | 647 | 191-199 |
| | skin, . . . | A2 | 44 | GLQLGVQAV | 648 | 229-237 |
| | | A2 | 44 | PLTEYIQPV | 649 | 268-276 |
| IDO1 | lymph nodes, | A2 | 44 | ALLEIASCL | 650 | 199-207 |
| | placenta, and many | | | | | |
| | cell types in the | | | | | |
| | course of | | | | | |
| | inflammatory | | | | | |
| | response | | | | | |
| IGF2B3 | ubiquitous | A2 | 44 | NLSSAEVVV | 651 | 515-523 |
| | (low level) | A3 | 44 | RLLVPTQFV | 652 | 199-207 |
| IL13Ralpha2 | | A2 | 44 | WLPFGFILI | 653 | 345-353 |
| Intestinal | liver, intestine, | B7 | 17 | SPRWWPTCL | 654 | alt. ORF |
| carboxyl | kidney | | | | | |
| esterase | | | | | | |
| alpha- | liver | A2 | 44 | GVALQTMKQ | 655 | 542-550 |
| foetoprotein | | A2 | 44 | FMNKFIYEI | 656 | 158-166 |
| | | DR13 | 19 | QLAVSVILRV | 657 | 364-373 |
| Kallikrein 4 | prostate and | A2 | 44 | FLGYLILGV | 658 | 11-19 |
| | ovarian cancer | DP4 | 75 | SVSESDTIRSISIAS | 659 | 125-139 |
| | cancer | DR4 | 24 | LLANGRMPTVLQCVN | 660 | 155-169 |
| | | DR7 | 25 | RMPTVLQCVNVSVVS | 661 | 160-174 |
| KIF20A | ubiquitous | A2 | 44 | LLSDDDVVV | 662 | 12-20 |
| | (low level) | A2 | 44 | AQPDTAPLPV | 663 | 284-293 |
| | | A2 | 44 | CIAEQYHTV | 664 | 809-817 |
| Lengsin | eye lens and low | A2 | 44 | FLPEFGISSA | 665 | 270-279 |
| | level in multiple | | | | | |
| | tissues | | | | | |
| M-CSF | liver, kidney | B35 | 20 | LPAVVGLSPGEQEY | 666 | alt. ORF |
| MCSP | endothelial cells, | DR11 | 25 | VGQDVSVLFRVTGALQ | 667 | 693-708 |
| | chondrocytes, | | | | | |
| | smooth muscle | | | | | |
| | cells | | | | | |
| mdm-2 | ubiquitous (brain, | A2 | 44 | VLFYLGQY | 668 | 53-60 |
| | muscle, lung) | | | | | |
| Meloe | ubiquitous | A2 | 44 | TLNDECWPA | 669 | 36-44 |
| | (low level) | DQ2 | 41 | ERISSTLNDECWPA | 670 | 31-44 |
| | | DQ6 | 63 | FGRLQGISPKI | 671 | 32-44 |
| | | DR1 | 18 | TSREQFLPSEGAA | 672 | 11-23 |
| | | DR11 | 25 | CPPWHPSERISSTL | 673 | 24-37 |
| Midkine | ubiquitous | A2 | 44 | ALLALTSAV | 674 | 13-21 |
| | (low level) | A2 | 44 | AQCQETIRV | 675 | 114-122 |
| | | DR4 | 24 | LTLLALLALTSAVAK | 676 | 9-23 |
| MMP-2 | ubiquitous | A2 | 44 | GLPPDVQRVH | 677 | 560-568 |
| MMP-7 | ubiquitous | A3 | 22 | SLFPNSPKWTSK | 678 | 96-107 |
| | (low level) | | | | | |
| MUC1 | glandular epithelia | A2 | 44 | STAPPVHNV | 679 | 950-958 |
| | | A2 | 44 | LLLLTVLTV | 680 | 12-20 |
| | | DR3 | 21 | PGSTAPPAHGVT | 681 | repeated |
| | | | | | | region |
| MUC5AC | surface mucosal | A24 | 20 | TCQPTCRSL | 682 | 716-724 |
| | cells, respiratory | | | | | |
| | tract, and stomach | | | | | |
| | epithelia | | | | | |
| p53 | ubiquitous | A2 | 44 | LLGRNSFEV | 683 | 264-272 |
| | (lowlevel) | A2 | 44 | RMPEAAPPV | 684 | 65-73 |
| | | B46 | 0.1 | SQKTYQGSY | 685 | 99-107 |
| | | DPS | 3 | PGTRVRAMAIYKQ | 686 | 153-165 |
| | | DR14 | 6 | HLIRVEGNLRVE | 687 | 193-204 |
| PAX5 | hemopoietic | A2 | 44 | TLPGYPPHV | 688 | 311-319 |
| | system | | | | | |
| PBF | ovary, pancreas, | B55 | 4 | CTACRWKKACQR | 689 | 499-510 |
| | spleen, liver | | | | | |
| PRAME | testis, ovary, | A2 | 44 | VLDGLDVLL | 690 | 100-108 |
| | endometrium, | A2 | 44 | SLYSFPEPEA | 691 | 142-151 |
| | adrenals | A2 | 44 | ALYVDSLFFL | 692 | 300-309 |
| | | A2 | 44 | SLLQHLIGL | 693 | 425-433 |
| | | A24 | 20 | LYVDSLFFLC | 694 | 301-309 |
| PSMA | prostate, CNS, | A24 | 20 | NYARTEDFF | 695 | 178-186 |
| | liver | | | | | |
| RAGE-1 | retina | A2 | 44 | LKLSGVVRL | 696 | 352-360 |
| | | A2 | 44 | PLPPARNGGLG | 697 | 32-40 |
| | | B7 | 17 | SPSSNRIRNT | 698 | 11-20 |
| RGS5 | heart, skeletal | A2 | 44 | LAALPHSCL | 699 | 5-13 |
| | muscle, pericytes | A3 | 22 | GLASFKSFLK | 700 | 74-83 |
| RhoC | ubiquitous | A3 | 22 | RAGLQVRKNK | 701 | 176-185 |
| | (low level) | | | | | |
| RNF43 | | A2 | 44 | ALWPWLLMA(T) | 702 | 11-19 |
| | | | | | | (20) |
| | | A24 | 20 | NSQPVWLCL | 703 | 721-729 |
| RU2AS | testis, kidney, | B7 | 17 | LPRWPPPQL | 704 | antisense |
| | bladder | | | | | |
| secernin 1 | ubiquitous | A2 | 44 | KMDAEHPEL | 705 | 196-204 |
| SOX10 | ubiquitous (low | A2 | 44 | AWISKPPGV | 706 | 332-340 |
| | level) | A2 | 44 | SAWISKPPGV | 707 | 331-340 |
| STEAP1 | prostate | A2 | 44 | MIAVFLPIV | 708 | 292-300 |
| | | A2 | 44 | HQQYFYKIPILVINK | 709 | 102-116 |
| survivin | ubiquitous | A2 | 44 | ELTLGEFLKL | 710 | 95-104 |
| | ubiquitous | DR1 | 18 | TLGEFLKLDRERAKN | 711 | 97-111 |
| Telomerase | testis, thymus, | A2 | 44 | ILAKFLHWLE | 712 | 540-548 |
| | bone marrow, | A2 | 44 | RLVDDFLLV | 713 | 865-873 |
| | lymph nodes | DR7 | 25 | RPGLLGASVLGLDDI | 714 | 672-686 |
| | | DR11 | 25 | LTDLQPYMRQFVAHL | 715 | 766-780 |
| | | hTERT | | WLFFYRKSV(R) | 716 | 572-581 |
| | | (572) | | | | |
| TPBG | multiple tissues | A2 | 44 | RLARLALVL | 717 | 17-25 |
| | (esophagus, | | | | | |
| | bladder, etc.) | | | | | |
| VEGF | ubiquitous | B27 | 7 | SRFGGAVVR | 718 | -i |
| | (low level) | | | | | |
| WT1 | testis, ovary, bone | A1 | 26 | TSEKRPFMCAY | 719 | 317-327 |
| | marrow, spleen | A24 | 20 | CMTWNQMNL | 720 | 235-243 |
| | | DP5 | 3 | LSHLQMHSRKH | 721 | 337-347 |
| | | DP5 | 3 | KRYFKLSHLQMHSRKH | 722 | 332-347 |
| | | DR4 | 24 | KRYFKLSHLQMHSRKH | 723 | 332-347 |

[0163] The identification of heteroclitic peptides are described in the art. For example, in previous studies (Selby, et al., J. Immunol., 162(2):669 (1999), Skipper, et al., J. Exp. Med. 183:527 (1996), the entire contents of each of which are incorporated herein by reference), heteroclitic epitopes were fortuitously identified by eluting naturally occurring mutant peptides from melanoma cells, or by systematically screening a large number of epitopes consisting of substitutions at almost every position in the epitope (Zaremba, et al., Cancer Research, 57:4570 (1997), Loftus, et al., Cancer Research 58:2433 (1998), Blake, et al., J. Exp. Med. 18:121 (1996), the entire contents of each of which are incorporated herein by reference). Alternatively, heteroclitic epitopes were identified by screening random combinatorial peptide libraries which also has required the arduous synthesis and screening of large numbers of peptides (Pinilla, et al., Current Opinion in Immunology 11:193-202 (1999), the entire contents of each of which are incorporated herein by reference). Genetic approaches, such as screening of DNA expression libraries, have provided another method for generating CTL epitopes and analogs (Boon, et al., Annu. Rev. Immunol. 12:337-65 (1994), Gavin, et al., Eur. J. Immunol. 24(9):2124-33 (1994), the entire contents of each of which are incorporated herein by reference).

### Generating Cancer Vaccine in Tumor Cells

[0164] Some aspects of the present disclosure provide systems, compositions, and methods of editing genes encoding tumor specific antigens in vivo (e.g., in tumor cells in a subject) or ex vivo (e.g., in isolated tumor cells) to introduce mutations in the genes encoding tumor specific antigens. In some embodiments, such mutations lead to the production of heteroclitic peptides that are more immunogenic than native peptides of the tumor-specific antigen. In some embodiments, such mutations lead to the translation of a non-coding region of the tumor specific antigen, which results in cryptic peptides that are more immunogenic than any native peptides from the tumor specific antigen.

[0165] The gene editing methods described herein, rely on nucleobase editors as described in, in U.S. Pat. No. 9,068,179, US Patent Application Publications US 2015/0166980, US 2015/0166981, US 2015/0166982, US20150166984, and US20150165054, and US Provisional Applications, U.S. Ser. No. 62/245,828, filed Oct. 23, 2015; 62/279,346, filed Jan. 15, 2016; 62/311,763, filed Mar. 22, 2016; 62/322,178, filed Apr. 13, 2016, 62/357,352, filed Jun. 30, 2016, 62/370,700, filed Aug. 3, 2016; 62/398,490, filed Sep. 22, 2016; 62/408,686, filed Oct. 14, 2016; PCT Application PCT/US2016/058344, filed Oct. 22, 2016, U.S. patent application Ser. No. 15/311,852, filed Oct. 22, 2016; and in Komor et al., Nature, Programmable editing of a target base in genomic DNA without double-stranded DNA cleavage, 533, 420-424 (2016), the entire contents of each of which are incorporated herein by reference.

[0166] The nucleobase editors are highly efficient at precisely editing a target base in any of the tumor associated antigen genes described herein, and a DNA double stand break is not necessary for the gene editing, thus reducing genome instability and preventing possible oncogenic modifications that may be caused by other genome editing methods. The nucleobase editors described herein may be programmed to target and modify a single base. In some embodiments, the target base is a cytosine (C) base and may be converted to a thymine (T) base via deamination by the nucleobase editor.

[0167] To edit the polynucleotide encoding a tumor associated antigen, the polynucleotide is contacted with a nucleobase editor as described herein. In some embodiments, the tumor-associated antigen encoding polynucleotide is contacted with a nucleobase editor and a guide nucleotide sequence, wherein the guide nucleotide sequence targets the nucleobase editor the target base (e.g., a C base) in the tumor-associated antigen encoding polynucleotide.

[0168] In some embodiments, the tumor-associated antigen encoding polynucleotide is the tumor-associated antigen gene locus in the genomic DNA of a cell (e.g., a tumor cell). In some embodiments, the tumor cell is a cultured cell. In some embodiments, the tumor cell is in vivo. In some embodiments, the tumor cell is ex vivo. In some embodiments, the tumor cell is from a mammal. In some embodiments, the mammal is a human. In some embodiments, the mammal is a rodent. In some embodiments, the rodent is a mouse. In some embodiments, the rodent is a rat.

[0169] In some embodiments, the tumor-associated antigen encoding polynucleotide may be a DNA molecule comprising a coding strand and a complementary strand, e.g., the tumor-associated antigen gene locus in the genome of a tumor cell. In some embodiments, the tumor-associated antigen encoding polynucleotide may also include coding regions (e.g., exons) and non-coding regions (e.g., introns or splicing sites). In some embodiments, the target base (e.g., a C base) is located in the coding region (e.g., an exon) of the tumor-associated antigen encoding polynucleotide. As such, the conversion of a base in the coding region may result in an amino acid change in the tumor-associated antigen protein sequence, i.e., a mutation. Tumor associated antigens comprising the desired mutation(s), once degraded (e.g., via any of the protein degradation pathways, such as degradation by the proteasome) results in immunogenic heteroclitic epitopes.

[0170] In some embodiments, the target base is located in a non-coding region of the tumor-associated antigen gene, e.g., in an intron or a splice site. In some embodiments, a target base is located in a splice site, and the editing of such target base causes alternative splicing of the tumor-associated antigen mRNA. In some embodiments, the alternative splicing leads to translation of a non-coding region of the tumor-associated antigen gene, generating cryptic epitopes. The immunogenic epitopes (e.g., heteroclitic epitopes or cryptic epitopes) may be presented by the tumor cell, or a professional antigen presenting cell, and be recognized by the immune system, thus eliciting a tumor-specific immune response (e.g., T-cell response or B-cell response).

[0171] To edit a tumor-associated antigen gene, the tumor-associated antigen gene (a polynucleotide molecule) may be contacted with the nucleobase editor, wherein the nucleobase editor binds to its target sequence and edits the desired base. For example, the nucleobase editor may be expressed in a cell where editing is desired (e.g., a tumor), allowing editing of the tumor-associated antigen gene by the nucleobase editor. In some embodiments, the binding of the nucleobase editor to its target sequence in the tumor-associated antigen gene is mediated by a guide nucleotide sequence, e.g., a nucleotide molecule comprising a nucleotide sequence that is complementary to one of the strands of the target sequence in the tumor-associated antigen gene. Thus, by designing the guide nucleotide sequence, the nucleobase editor may be programmed to edit any target base in any tumor associated antigen gene. In some embodiments, the guide nucleotide sequence is co-expressed with the nucleobase editor in a tumor cell where editing is desired. In some embodiments, a nucleobase editor/gRNA complex is delivered to the cell where editing is desired (e.g., a tumor cell).

[0172] Provided herein are non-limiting, exemplary heteroclitic epitopes and cryptic epitopes that may be produced via base editing and strategies for making them.

### Codon Change

[0173] Using the nucleobase editors described herein, several amino acid codons may be converted to a different codon via deamination of a target base within the codon. For example, in some embodiments, a cytosine (C) base is converted to a thymine (T) base via deamination by a nucleobase editor comprising a cytosine deaminase domain (e.g., APOBEC1 or AID). It is worth noting that during a C to T change via deamination (e.g., by a cytosine deaminase such as APOBEC1 or AID), the cytosine is first converted to a uridine (U), leading to a G:U mismatch. The G:U mismatch is then converted by DNA repair and replication pathways to T:A pair, thus introducing the thymine at the position of the original cytosine. As such, deamination of a C base results in a C-G base pair being replaced by a T-A base pair.

[0174] As is familiar to one skilled in the art, conversion of a base in an amino acid codon may lead to a change of the amino acid the codon encodes. Cytosine deaminases are capable of converting a cytosine (C) base to a thymine (T) base via deamination. Thus, it is envisioned that, for amino acid codons containing a C base, the C base may be directly converted to T. For example, codon for leucine (CTC) may be changed to a TTC (phenylalanine) codon via the deamination of the first C on the coding strand. For amino acid codons that contain a guanine (G) base, a C base is present on the complementary strand; and the G base may be converted to an adenosine (A) via the deamination of the C on the complementary strand. For example, an ATG (Met/M) codon may be converted to a ATA (Ile/I) codon via the deamination of the third C on the complementary strand. In some embodiments, two C to T changes are required to convert a codon to a different codon. Non-limiting examples of possible mutations that may be made in any tumor associated antigens by the nucleobase editors of the present disclosure are summarized in Table 4.

TABLE 4
Exemplary Codon Changes via Base Editing

| Target codon | Base-editing reaction (s) | Edited codon |
|---|---|---|
| CTT (Leu/L) | 1st base C to T on coding strand | TTT (Phe/F) |
| CTC (Leu/L) | 1st base C to T on coding strand | TTC (Phe/F) |
| ATG (Met/M) | 3rd base C to T on complementary strand | ATA (Ile/I) |
| GTT (Val/V) | 1st base C to T on complementary stand | ATT (Ile/I) |
| GTA (Val/V) | 1st base C to T on complementary stand | ATA (Ile/I) |
| GTC (Val/V) | 1st base C to T on complementary strand | ATC (Ile/I) |
| GTG (Val/V) | 1st base C to T on complementary strand | ATG (Met/M) |
| TCT (Ser/S) | 2nd base C to T on coding strand | TTT (Phe/F) |
| TCC (Ser/S) | 2nd base C to T on coding strand | TTC (Phe/F) |
| TCA (Ser/S) | 2nd base C to T on coding strand | TTA (Leu/L) |
| TCG (Ser/S) | 2nd base C to T on coding strand | TTG (Leu/L) |
| AGT (Ser/S) | 2nd base C to T on complementary strand | AAT (Asp/N) |
| AGC (Ser/S) | 2nd base C to T on complementary strand | AAC (Aps/N) |
| CCT (Pro/P) | 1st base C to T on coding strand | TCT (Ser/S) |
| CCC (Pro/P) | 1st base C to T on coding strand | TCC (Ser/S) |
| CCA (Pro/P) | 1st base C to T on coding strand | TCA (Ser/S) |
| CCG (Pro/P) | 1st base C to T on coding strand | TCG (Ser/S) |
| CCT (Pro/P) | 2nd base C to T on coding strand | CTT (Leu/L) |
| CCC (Pro/P) | 2nd base C to T on coding strand | CTC (Leu/L) |
| CCA (Pro/P) | 2nd base C to T on coding strand | CTA (Leu/L) |
| CCG (Pro/P) | 2nd base C to T on coding strand | CTG (Leu/L) |
| ACT (Thr/T) | 2nd base C to T on coding strand | ATT (Leu/L) |
| ACC (Thr/T) | 2nd base C to T on coding strand | ATC (Leu/L) |
| ACA (Thr/T) | 2nd base C to T on coding strand | ATA (Leu/L) |
| ACG (Thr/T) | 2nd base C to T on coding strand | ATG (Met/M) |
| GCT (Ala/A) | 2nd base C to T on coding strand | GTT (Val/V) |
| GCC (Ala/A) | 2nd base C to T on coding strand | GTC (Val/V) |
| GCA (Ala/A) | 2nd base C to T on coding strand | GTA (Val/V) |
| GCG (Ala/A) | 2nd base C to T on coding strand | GTG (Val/V) |
| GCT (Ala/A) | 1st base C to T on complementary stand | ACT (Thr/T) |
| GCC (Ala/A) | 1st base C to T on complementary stand | ACC (Thr/T) |
| GCA (Ala/A) | 1st base C to T on complementary stand | ACA (Thr/T) |
| GCG (Ala/A) | 1st base C to T on complementary stand | ACG (Thr/T) |
| CAT (His/H) | 1st base C to T on complementary stand | TAT (Tyr/Y) |
| CAC (His/H) | 1st base C to T on complementary stand | TAC (Tyr/Y) |
| GAT (Asp/D) | 1st base C to T on complementary stand | AAT (Asp/N) |
| GAC (Asp/D) | 1st base C to T on complementary stand | AAC (Asp/N) |
| GAA (Glu/E) | 1st base C to T on complementary stand | AAA (Lys/K) |
| GAG (Glu/E) | 1st base C to T on complementary stand | AAG (Lys/K) |
| TGT (Cys/C) | 2nd base C to T on complementary stand | TAT (Tyr/Y) |
| TGC (Cys/C) | 2nd base C to T on complementary stand | TAC (Tyr/Y) |
| CGT (Arg/R) | 1st base C to T on coding strand | TGT (Cys/C) |
| CGC (Arg/R) | 1st base C to T on coding strand | TGC (Cys/C) |
| AGA (Arg/R) | 2nd base C to T on complementary stand | AAA (Lys/K) |
| AGG (Arg/R) | 2nd base C to T on complementary stand | AAG (Lys/K) |
| CGG (Arg/R) | 2nd base C to T on complementary stand | CAG (Gln/Q) |
| CGG (Arg/R) | 1st base C to T on coding strand | TGG (Trp/W) |
| GGT (Gly/G) | 2nd base C to T on complementary stand | GAT (Asp/D) |
| GGC (Gly/G) | 2nd base C to T on complementary stand | GAC (Asp/D) |
| GGA (Gly/G) | 2nd base C to T on complementary stand | GAA (Glu/E) |
| GGG (Gly/G) | 2nd base C to T on complementary stand | GAG (Glu/E) |
| GGT (Gly/G) | 1st base C to T on complementary stand | AGT (Ser/S) |
| GGC (Gly/G) | 1st base C to T on complementary stand | AGC (Ser/S) |
| GGA (Gly/G) | 1st base C to T on complementary stand | AGA (Arg/R) |
| GGG (Gly/G) | 1st base C to T on complementary stand | AGG (Arg/R) |

[0175] Such amino acid substitutions introduced via base editing generate heteroclitic epitopes. Non-limiting examples of heteroclitic epitopes that may be generated from tumor associated antigens by nucleobase editors are summarized in Table 5.

[0176] In some embodiments, to bind to its target sequence and edit the desired base, the nucleobase editor depends on its guide nucleotide sequence (e.g., a guide RNA). In some embodiments, the guide nucleotide sequence is a gRNA sequence. A gRNA typically comprises a tracrRNA framework allowing for Cas9 binding, and a guide sequence, which confers sequence specificity to fusion proteins disclosed herein. In some embodiments, the guide RNA comprises the structure 5′-[guide sequence]-guuuuagagcuagaaauagcaaguuaaaauaaaggcuaguccguuaucaacuugaaaaaguggcaccgagucggugcuu uuu-3′ (SEQ ID NO: 336), wherein the guide sequence comprises a sequence that is complementary to the target sequence. Other suitable tracrRNA framework sequences are provided in Table 11. The guide sequence is typically about 20 nucleotides long. In certain embodiments, the guide sequence may be 15-25 nucleotides long. In some embodiments, the guide sequence is 15, 16, 17, 18, 19, 20, 21, 22, 23, 24, or 25 nucleotides long. Such suitable guide RNA sequences typically comprise guide sequences that are complementary to a nucleic sequence within 50 (e.g., within 50, 45, 40, 35, 30, 35, 20, 19, 18, 17, 16, 15, 14, 13, 12, 11, or 10) nucleotides upstream or downstream of the target nucleotide to be edited.

[0177] Guide sequences that may be used to target the nucleobase editor to its target sequence to induce specific mutations in tumor associated antigen genes are provided in Table 5. It is to be understood that the mutations and guide sequences presented herein are for illustration purpose only and are not meant to be limiting.

TABLE 5
Heteroclitic epitopes

| Antigen | | | | | | |
|---|---|---|---|---|---|---|
| Name/Epitope | Heteroclitic | | | | | |
| amino acid | epitope | | | | | |
| position | (mutation), | | | | | |
| (Exemplary | Genomic | Programmable guide-RNA | SEQ ID | | gRNA size | Genome Editor |
| condition) | target region | sequence | NO | (PAM) | (C-edited) | type^{a} |
| gp100/209-217 | IIDQVPFSV | GCCUUCACCAUUACUGGUAA | 724 | (GGG) | 20 (C14) | SpBE3 |
| (melanoma) | (T210I) | CACCAUUACUGGUAAGGGUU | 870 | (TAG) | 20 (C9) | SpBE3 |
| | (SEQ ID | ACCAUUACUGGUAAGGGUUU | 871 | (AGG) | 20 (C8) | SpBE3 |
| | NO: 786) | CCAUUACUGGUAAGGGUUUA | 872 | (GGAA) | 20 (C7) | VQR-SpBE3 |
| | ttcaccattaCt | AUUACUGGUAAGGGUUUAGG | 873 | (AAG) | 20 (C5) | SpBE3 |
| | ggtaagggttta | UUACUGGUAAGGGUUUAGGA | 874 | (AGG) | 20 (C4) | SpBE3 |
| | ggaaggggca | UACUGGUAAGGGUUUAGGAA | 875 | (GGG) | 20 (C3) | SpBE3 |
| | (SEQ ID | ACUGGUAAGGGUUUAGGAAG | 876 | (GGG) | 20 (C2) | SpBE3 |
| | NO: 831) | CAGCCUUCACCAUUACUGGU | 877 | (AAGGGT) | 20 (C16) | SaBE3 |
| | | UUACUGGUAAGGGUUUAGGA | 888 | (AGGGG) | 20 (C5) | St3BE3 |
| gp100/280-288 | YLEPGPVT | UCACUGCCCAGGUGGUCCUG | 725 | (CAG) | 20 (C7) | SpBE3 |
| (melanoma) | V (A288V) | CACUGCCCAGGUGGUCCUGC | 889 | (AGG) | 20 (C6) | SpBE3 |
| | (SEQ ID | | | | | |
| | NO: 818) | | | | | |
| | agtcactgCcc | | | | | |
| | aggtggtcctg | | | | | |
| | caggctgccatt | | | | | |
| | cc (SEQ ID | | | | | |
| | NO: 832) | | | | | |
| gp100/154-162 | KIWGQYW | AUGUCUGGAAGACCUGGGGU | 726 | (GAG) | 20 (C13) | SpBE3 |
| (melanoma) | QV (T155I) | UGUCUGGAAGACCUGGGGUG | 890 | (AGG) | 20 (C12) | SpBE3 |
| | (SEQ ID | GUCUGGAAGACCUGGGGUGA | 891 | (GGG) | 20 (C11) | SpBE3 |
| | NO: 787) | UCUGGAAGACCUGGGGUGAG | 892 | (GGAC) | 20 (C10) | VQR-SpBE3 |
| | tatgtctggaag | | | | | |
| | aCctggggtg | | | | | |
| | agggactccctt | | | | | |
| | ct (SEQ ID | | | | | |
| | NO: 833) | | | | | |
| MART-1/26-35 | EVAGIGILT | GGCCGCAGGGAUCGGCAUCC | 727 | (TGAT) | 20 (C6) | VQR-SpBE3 |
| (melanoma) | V (A27V) | GCAGGGAUCGGCAUCCUGAU | 893 | (CGTG) | 20 (C2) | VQR-SpBE3 |
| | (SEQ ID | UGGUCCAGGGCCGCAGGGAU | 894 | (CGG) | 20 (C14) | SpBE3 |
| | NO: 819) | AGGGCCGCAGGGAUCGGCAU | 895 | (CCTGAT) | 20 (C8) | KKH-SaBE3 |
| | tggtccagggc | GCAGGGAUCGGCAUCCUGAU | 896 | (CGTGGT) | 20 (C2) | KKH-SaBE3 |
| | cgCagggatc | | | | | |
| | ggcatcctgatc | | | | | |
| | gtggtcctggg | | | | | |
| | ga (SEQ ID | | | | | |
| | NO: 834) | | | | | |
| NY-ESO-1/157- | SLLMWITQ | ACUGCGUGAUCCACAUCAAC | 728 | (AGG) | 20 (C-1) | SpBE3 |
| 165 | Y (C165Y) | CACUGCGUGAUCCACAUCAA | 897 | (CAG) | 20 (C1) | SpBE3 |
| (multiple | (SEQ ID | | | | | |
| tumors, e.g., | NO: 788) | | | | | |
| melanoma and | ctttccctgttgat | | | | | |
| breast cancer) | gtggatcacgc | | | | | |
| | agtGctttctgc | | | | | |
| | cc (SEQ ID | | | | | |
| | NO: 835) | | | | | |
| TYR/369-377 | YMNGIMSQ | AUGGAACAAUGUCCCAGGUA | 729 | (CAG) | 20 (C7) | SpBE3 |
| (melanoma) | V (T373I) | UGGAACAAUGUCCCAGGUAC | 898 | (AGG) | 20 (C6) | SpBE3 |
| | (SEQ ID | GGAACAAUGUCCCAGGUACA | 899 | (GGG) | 20 (C5) | SpBE3 |
| | NO: 789) | GAACAAUGUCCCAGGUACAG | 900 | (GGAT) | 20 (C4) | VQR-SpBE3 |
| | tatgaatggaa | UGGAACAAUGUCCCAGGUAC | 901 | (AGGGAT) | 20 (C6) | SaBE3 |
| | Caatgtcccag | | | | | |
| | gtacagggatc | | | | | |
| | tgcc (SEQ | | | | | |
| | ID NO: 836) | | | | | |
| TyRP-1/240- | DAEKYDIC | CACACUUUUCUGCAUCCCGC | 730 | (CAG) | 20 (C3) | SpBE3 |
| 251 | TDEY | GUCACACUUUUCUGCAUCCC | 902 | (GCCAGT) | 20 (C5) | KKH-SaBE3 |
| (melanoma) | (C244Y) | | | | | |
| | (SEQ ID | | | | | |
| | NO: 790) | | | | | |
| | tgggactggcg | | | | | |
| | ggatgcagaa | | | | | |
| | aagtGtgacat | | | | | |
| | ttgcacagatg | | | | | |
| | agtacatggga | | | | | |
| | (SEQ ID | | | | | |
| | NO: 837) | | | | | |
| Survivin/95-102 | ELILGEFLK | AUUAACCCUUGGUGAAUUUU | 731 | (TGAA) | 20 (C6) | VQR-SpBE3 |
| (multiple | L (T97I) | CCUUGGUGAAUUUUUGAAAC | 903 | (TGG) | 20 (C-1) | SpBE3 |
| tumors, e.g., | (SEQ ID | | | | | |
| melanoma, | NO: 791) | | | | | |
| breast cancer, | tttgaagaatta | | | | | |
| and leukemia) | aCccttggtga | | | | | |
| | atttttgaaactg | | | | | |
| | gac (SEQ ID | | | | | |
| | NO: 838) | | | | | |
| HER2/657-666 | AMVGILLVV | CGCAGAGAUGAUGGACGUCA | 732 | (GAG) | 20 (C-1) | VQR-SpBE3 |
| (breast cancer) | V (V658M) | ACCGCAGAGAUGAUGGACGU | 904 | (CAG) | 20 (C2) | SpBE3 |
| | (SEQ ID | CCAACCACCGCAGAGAUGAU | 905 | (GGAC) | 20 (C8) | VQR-SpBE3 |
| | NO: 793) | GCCAACCACCGCAGAGAUGA | 906 | (TGG) | 20 (C9) | SpBE3 |
| | gcttccgccccc | AAUGCCAACCACCGCAGAGA | 907 | (TGAT) | 20 (C12) | VQR-SpBE3 |
| | agccctctgac | AGAAUGCCAACCACCGCAGA | 908 | (GATGAT) | 20 (C14) | KKH-SaBE3 |
| | gtccatcatctct | CCGCAGAGAUGAUGGACGUC | 909 | (AGAG) | 20 (C1) | EQR-SpBE3 |
| | gcgGtggttgg | | | | | |
| | cattctgctggtc | | | | | |
| | (SEQ ID | | | | | |
| | NO: 839) | | | | | |
| HER2/911-920 | IIWELMTFG | AGGUGUGACUGUGUGGGAGC | 733 | (TGAT) | 20 (C9) | VQR-SpBE3 |
| (breast cancer) | A (T912I) | UGUGACUGUGUGGGAGCUGA | 910 | (TGAC) | 20 (C6) | VQR-SpBE3 |
| | (SEQ ID | UUAGGUGUGACUGUGUGGGA | 911 | (GCTGAT) | 20 (C11) | KKH-SaBE3 |
| | NO: 794) | GUGUGGGAGCUGAUGACUUU | 912 | (TGGGG) | 20 (C-2) | St3BE3 |
| | aggtgtgaCtg | | | | | |
| | tgtgggagctg | | | | | |
| | atgacttttggg | | | | | |
| | gCcaaacctta | | | | | |
| | cgatgggatcc | | | | | |
| | cagcccggga | | | | | |
| | gatccct | | | | | |
| | (SEQ ID | | | | | |
| | NO: 840) | | | | | |
| HER2/911-920 | ITWELMTF | ACUUUUGGGGCCAAACCUUA | 734 | (CGAT) | 20 (C11) | VQR-SpBE3 |
| (breast cancer) | GV (A920V) | UUUGGGGCCAAACCUUACGA | 913 | (TGG) | 20 (C8) | SpBE3 |
| | (SEQ ID | UUGGGGCCAAACCUUACGAU | 914 | (GGG) | 20 (C7) | SpBE3 |
| | NO: 795) | UUUGGGGCCAAACCUUACGA | 915 | (TGGGAT) | 20 (C8) | SaBE3 |
| | gacttttgggg | | | | | |
| | Ccaaaccttac | | | | | |
| | gatgggatccc | | | | | |
| | agcccggg | | | | | |
| | (SEQ ID | | | | | |
| | NO: 841) | | | | | |
| hTERT/540- | ILAKFLHWL | CAUCAGCCAGUGCAGGAACU | 735 | (TGG) | 20 (C1) | SpBE3 |
| 549 | I (M549I) | CACACUCAUCAGCCAGUGCA | 916 | (GGAA) | 20 (C7) | VQR-SpBE3 |
| (breast cancer) | (SEQ ID | ACACACUCAUCAGCCAGUGC | 917 | (AGG) | 20 (C8) | SpBE3 |
| | NO:) | UACACACUCAUCAGCCAGUG | 918 | (CAG) | 20 (C9) | SpBE3 |
| | cgtgaggagat | GACGUACACACUCAUCAGCC | 919 | (AGTG) | 20 (C12) | VQR-SpBE3 |
| | cctggccaagtt | GACGACGUACACACUCAUCA | 920 | (GCCAGT) | 20 (C11) | KKH-SaBE3 |
| | cctgcactggct | | | | | |
| | gatGagtgtgt | | | | | |
| | acgtcgtcgag | | | | | |
| | ctg (SEQ ID | | | | | |
| | NO: 842) | | | | | |
| hTERT/572- | WLFFYRKS | UUCUGAUGCUCGGCUCUUCU | 736 | (TGG) | 20(C11) | SpBE3 |
| 580 | V (R572W) | | | | | |
| (breast cancer) | (SEQ ID | | | | | |
| | NO: 716) | | | | | |
| | cccaagcctat | | | | | |
| | cttttctgatgct | | | | | |
| | Cggctcttcttg | | | | | |
| | gtcacctctccg | | | | | |
| | ttcca (SEQ | | | | | |
| | ID NO: 843) | | | | | |
| SSX2/41-49 | KVSEKIFYV | GAAAAGAUGAAAGCCUCGGA | 737 | (GAAAAT) | 20 (C14) | KKH-SaBE3 |
| (multiple | (A42V) | GCCUCGGAGAAAAUCUUCUA | 921 | (TGTG) | 20 (C2) | VQR-SpBE3 |
| tumors) | (SEQ ID | | | | | |
| | NO: 792) | | | | | |
| | ggaaaagatg | | | | | |
| | aaagCctcgg | | | | | |
| | agaaaatcttct | | | | | |
| | atgtgtatatga | | | | | |
| | agagaaagtat | | | | | |
| | gaggctatgac | | | | | |
| | t (SEQ ID | | | | | |
| | NO: 844) | | | | | |
| WT1/235-243 | YMTWNQM | CAGGUCAUGCAUUCAAGCUG | 738 | (GGAT) | 20 (C10) | VQR-SpBE3 |
| (Leukemia) | NL (C235Y) | CCAGGUCAUGCAUUCAAGCU | 922 | (GGG) | 20 (C11) | SpBE3 |
| | (SEQ ID | UCCAGGUCAUGCAUUCAAGC | 923 | (TGG) | 20 (C12) | SpBE3 |
| | NO: 798) | GCAUUCAAGCUGGGAUGUCA | 924 | (TTTGGT) | 20 (C2) | KKH-SaBE3 |
| | atttataccaaa | UCCAGGUCAUGCAUUCAAGC | 925 | (TGGGAT) | 20 (C12) | SaBE3 |
| | tgacatcccag | | | | | |
| | cttgaatGcatg | | | | | |
| | acctgga | | | | | |
| | (SEQ ID | | | | | |
| | NO: 845) | | | | | |
| WT1/235-243 | CITWNQMN | UGAUUCCAGGUCAUGCAUUC | 739 | (AAG) | 20 (C12) | SpBE3 |
| (Leukemia) | L (M236I) | UCCAGGUCAUGCAUUCAAGC | 928 | (TGGGAT) | 20 (C8) | SaBE3 |
| | (SEQ ID | CAGGUCAUGCAUUCAAGCUG | 926 | (GGAT) | 20 (C6) | VQR-SpBE3 |
| | NO: 799) | CCAGGUCAUGCAUUCAAGCU | 927 | (GGG) | 20 (C7) | SpBE3 |
| | atttataccaaa | UCCAGGUCAUGCAUUCAAGC | 929 | (TGG) | 20 (C8) | SpBE3 |
| | tgacatcccag | | | | | |
| | cttgaatgcatG | | | | | |
| | acctggaatca | | | | | |
| | gat (SEQ ID | | | | | |
| | NO: 846) | | | | | |
| CD33/65-73 | VIISGDSPV | GGGAAGGAGCCAUUAUAUCC | 740 | (AGG) | 20 (C10) | SpBE3 |
| (Leukemia) | (A65V) | GGAAGGAGCCAUUAUAUCCA | 930 | (GGG) | 20 (C9) | SpBE3 |
| | (SEQ ID | GAAGGAGCCAUUAUAUCCAG | 931 | (GGAC) | 20 (C8) | VQR-SpBE3 |
| | NO: 796) | GCCAUUAUAUCCAGGGACUC | 932 | (TCCAGT) | 20 (C2) | KKH-SaBE3 |
| | ctggttccggg | | | | | |
| | aaggagCcat | | | | | |
| | tatatccaggg | | | | | |
| | actctccagtg | | | | | |
| | (SEQ ID | | | | | |
| | NO: 847) | | | | | |
| EpCAM/184- | ILYENNVII | UAAUGUUAUCACUAUUGAUC | 741 | (TGG) | 20 (C12) | SpBE3 |
| 192 | (T192I) | UUAUCACUAUUGAUCUGGUU | 933 | (CAAAAT) | 20 (C7) | KKH-SaBE3 |
| (multiple | (SEQ ID | AAUAAUGUUAUCACUAUUGA | 934 | (TCTGGT) | 20 (C14) | KKH-SaBE3 |
| tumors) | NO: 800) | | | | | |
| | atgagaataat | | | | | |
| | gttatcaCtattg | | | | | |
| | atctggttcaaa | | | | | |
| | attcttctc | | | | | |
| | (SEQ ID | | | | | |
| | NO: 848) | | | | | |
| CEA-CAM/24- | LLTFWNPPI | ACCACUGCCAAGCUCACUAU | 742 | (TGA) | 20 (C2) | SpBE3 |
| 31 | (T314I) | GGAACCCGCCCACCACUGCC | 935 | (AAG) | 20 (C13) | SpBE3 |
| (multiple | (SEQ ID | ACCACUGCCAAGCUCACUAU | 936 | (TGAA) | 20 (C2) | VQR-SpBE3 |
| tumors, e.g., | NO: 801) | | | | | |
| colorectal | taaccttctgga | | | | | |
| cancer, lung | acccgcccaC | | | | | |
| cancer, breast | cactgccaagc | | | | | |
| cancer) | tcactattgaatc | | | | | |
| | cacgccgt | | | | | |
| | (SEQ ID | | | | | |
| | NO: 849) | | | | | |
| CEA-CAM/310- | RITVTTITV | CCUCAAUAGGACCACAGUCA | 743 | (CGAC) | 20 (C12) | VQR-SpBE3 |
| 318 | (T311I) | CAAUAGGACCACAGUCACGA | 937 | (CGAT) | 20 (C9) | VQR-SpBE3 |
| (multiple | (SEQ ID | GACCACAGUCACGACGAUCA | 938 | (CAG) | 20 (C3) | SpBE3 |
| tumors, e.g., | NO: 802) | CUCAAUAGGACCACAGUCAC | 939 | (GACGAT) | 20 (C11) | KKH-SaBE3 |
| colorectal | gacactggcct | AGGACCACAGUCACGACGAU | 940 | (CACAGT) | 20 (C5) | KKH-SaBE3 |
| cancer, lung | caataggaCc | | | | | |
| cancer, breast | acagtcacgac | | | | | |
| cancer) | gatcacagtct | | | | | |
| | atggtaagtgg | | | | | |
| | atccacgaa | | | | | |
| | (SEQ ID | | | | | |
| | NO: 850) | | | | | |
| CEA-CAM/687- | AVVGIMIGV | UGGGGCCACUGUCGGCAUCA | 744 | (TGAT) | 20 (C9) | VQR-SpBE3 |
| 695 | (T688V) | GCCACUGUCGGCAUCAUGAU | 941 | (TGG) | 20 (C5) | SpBE3 |
| (multiple | (SEQ ID | CCACUGUCGGCAUCAUGAUU | 942 | (GGAG) | 20 (C4) | EQR-SpBE3 |
| tumors, e.g., | NO: 803) | CACUGUCGGCAUCAUGAUUG | 943 | (GAG) | 20 (C3) | SpBE3 |
| colorectal | tctcctggtctct | ACUGUCGGCAUCAUGAUUGG | 944 | (AGTG) | 20 (C2) | VQR-SpBE3 |
| cancer, lung | cagctggggcc | GCUGGGGCCACUGUCGGCAU | 945 | (CATGAT) | 20 (C11) | KKH-SaBE3 |
| cancer, breast | aCtgtcggcat | GCCACUGUCGGCAUCAUGAU | 946 | (TGGAGT) | 20 (C5) | SaBE3 |
| cancer) | catgattggagt | GCCACUGUCGGCAUCAUGAU | 947 | (TGGAG) | 20 (C5) | St3BE3 |
| | gctggttggggt | | | | | |
| | t (SEQ ID | | | | | |
| | NO: 851) | | | | | |
| CEA-CAM/691- | IMIGMLVGV | UCCAAUCAUGAUGCCGACAG | 745 | (TGG) | 20 (C-1) | SpBE3 |
| 699 | (V695M) | ACUCCAAUCAUGAUGCCGAC | 948 | (AGTG) | 20 (C2) | VQR-SpBE3 |
| (multiple | (SEQ ID | CACUCCAAUCAUGAUGCCGA | 949 | (CAG) | 20 (C3) | SpBE3 |
| tumors, e.g., | NO: 804) | CAGCACUCCAAUCAUGAUGC | 950 | (CGAC) | 20 (C6) | VQR-SpBE3 |
| colorectal | tctcagctggg | CCCAACCAGCACUCCAAUCA | 951 | (TGAT) | 20 (C12) | VQR-SpBE3 |
| cancer, lung | gccactgtcgg | AGCACUCCAAUCAUGAUGCC | 952 | (GACAGT) | 20 (C5) | KKH-SaBE3 |
| cancer, breast | catcatgattgg | ACCCCAACCAGCACUCCAAU | 953 | (CATGAT) | 20 (C14) | KKH-SaBE3 |
| cancer) | aGtgctggttg | | | | | |
| | gggtt (SEQ | | | | | |
| | ID NO: 852) | | | | | |
| MAGEA3/112- | KVAELVYF | GUUGGUUCAUUUUCUGCUCC | 746 | (TCAAGT) | 20 (C8) | KKH-SaBE3 |
| 120 | L (H118Y) | UGGUUCAUUUUCUGCUCCUC | 954 | (AAG) | 20 (C6) | SpBE3 |
| (multiple | (SEQ ID | | | | | |
| tumors) | NO: 805) | | | | | |
| | aggtggccga | | | | | |
| | gttggttCattttc | | | | | |
| | tgctcctcaagt | | | | | |
| | atcgagccag | | | | | |
| | ggagccggtc | | | | | |
| | ac (SEQ ID | | | | | |
| | NO: 853) | | | | | |
| MAGEA3/181- | YLGLSYDG | AGGUGACAAGGACAUAGGAG | 747 | (TGG) | 20 (C-1) | SpBE3 |
| 190 (also in | LL (C181Y) | GCAGGUGACAAGGACAUAGG | 955 | (AGTG) | 20 (C2) | VQR-SpBE3 |
| MAGE A1 | (SEQ ID | GGCAGGUGACAAGGACAUAG | 956 | (GAG) | 20 (C3) | SpBE3 |
| (multiple | NO: 806) | AGGCAGGUGACAAGGACAUA | 957 | (GGAG) | 20 (C4) | EQR-SpBE3 |
| tumors) | ctatgtccttgtc | UAGGCAGGUGACAAGGACAU | 958 | (AGG) | 20 (C5) | SpBE3 |
| | acctGcctagg | CUAGGCAGGUGACAAGGACA | 959 | (TAG) | 20 (C6) | SpBE3 |
| | tctctcctatgat | GAGACCUAGGCAGGUGACAA | 960 | (GGAC) | 20 (C11) | VQR-SpBE3 |
| | (SEQ ID | AGAGACCUAGGCAGGUGACA | 961 | (AGG) | 20 (C13) | SpBE3 |
| | NO: 854) | UAGGCAGGUGACAAGGACAU | 962 | (AGGAGT) | 20 (C5) | SaBE3 |
| MAGEA3/181- | YLGLSYDG | AGGUGACAAGGAUGUACAAG | 748 | (TGG) | 20 (C-1) | SpBE3 |
| 190 (also in | LL (C181Y) | GCAGGUGACAAGGAUGUACA | 963 | (AGTG) | 20 (C2) | VQR-SpBE3 |
| MAGE A2/A12 | (SEQ ID | GGCAGGUGACAAGGAUGUAC | 964 | (AAG) | 20 (C3) | SpBE3 |
| (multiple | NO: 806) | GAGGCCCAGGCAGGUGACAA | 965 | (GGAT) | 20 (C11) | VQR-SpBE3 |
| tumors) | tacatccttgtca | AGAGGCCCAGGCAGGUGACA | 966 | (AGG) | 20 (C13) | SpBE3 |
| | cctGcctgggc | CAGGCAGGUGACAAGGAUGU | 967 | (ACAAGT) | 20 (C5) | KKH-SaBE3 |
| | ctctcctacgat | GAGAGGCCCAGGCAGGUGAC | 968 | (AAGGAT) | 20 (C14) | SaBE3 |
| | (SEQ ID | | | | | |
| | NO: 855) | | | | | |
| MAGEA3/181- | YLGLSYDG | AGGUGGCAAAGAUGUACAAG | 749 | (TGG) | 20 (C-1) | SpBE3 |
| 190 (also in | LL (C181Y) | GCAGGUGGCAAAGAUGUACA | 969 | (AGTG) | 20 (C2) | VQR-SpBE3 |
| MAGE A3 | (SEQ ID | GGCAGGUGGCAAAGAUGUAC | 970 | (AAG) | 20 (C3) | SpBE3 |
| (multiple | NO: 806) | GAGGCCCAGGCAGGUGGCAA | 971 | (AGAT) | 20 (C11) | VQR-SpBE3 |
| tumors) | gtacatctttgcc | AGAGGCCCAGGCAGGUGGCA | 972 | (AAG) | 20 (C13) | SpBE3 |
| | acctGcctggg | CAGGCAGGUGGCAAAGAUGU | 973 | (ACAAGT) | 20 (C6) | KKH-SaBE3 |
| | cctctcctacga | GAGAGGCCCAGGCAGGUGGC | 974 | (AAAGAT) | 20 (C12) | KKH-SaBE3 |
| | (SEQ ID | | | | | |
| | NO: 856) | | | | | |
| MAGEA3/181- | YLGLSYDG | AGGCAGGUGACAAGGGUGUA | 750 | (GGTG) | 20 (C4) | VQR-SpBE3 |
| 190 (also in | LL (C181Y) | CAGGCAGGUGACAAGGGUGU | 975 | (AGG) | 20 (C5) | SpBE3 |
| MAGE A4 | (SEQ ID | CCAGGCAGGUGACAAGGGUG | 976 | (TAG) | 20 (C6) | SpBE3 |
| (multiple | NO: 806) | AGGCCCAGGCAGGUGACAAG | 977 | (GGTG) | 20 (C9) | VQR-SpBE3 |
| tumors) | tacacccttgtc | AAGGCCCAGGCAGGUGACAA | 978 | (GGG) | 20 (C10) | SpBE3 |
| | acctGcctggg | AAAGGCCCAGGCAGGUGACA | 979 | (AGG) | 20 (C11) | SpBE3 |
| | cctttcctatgat | GAAAGGCCCAGGCAGGUGAC | 980 | (AAG) | 20 (C12) | SpBE3 |
| | (SEQ ID | CCCAGGCAGGUGACAAGGGU | 981 | (GTAGGT) | 20 (C7) | KKH-SaBE3 |
| | NO: 857) | CAGGCAGGUGACAAGGGUGU | 982 | (AGGTG) | 20 (C5) | St3BE3 |
| | | AAGGCCCAGGCAGGUGACAA | 983 | (GGGTG) | 20 (C11) | St3BE3 |
| MUC-1/92-101 | AIWGQDVT | UCAGCUGCCACCUGGGGACA | 751 | (GGAT) | 20 (C11) | VQR-SpBE3 |
| (multiple | SV (T93I) | CUGGGGACAGGAUGUCACCU | 984 | (CGG) | 20 (C-1) | SpBE3 |
| tumors) | (SEQ ID | ACCUGGGGACAGGAUGUCAC | 985 | (CTCGGT) | 20 (C2) | KKH-SaBE3 |
| | NO: 807) | | | | | |
| | tcagctgccaC | | | | | |
| | ctggggacag | | | | | |
| | gatgtcacctcg | | | | | |
| | gtcccagtcac | | | | | |
| | caggcca | | | | | |
| | (SEQ ID | | | | | |
| | NO: 858) | | | | | |

^{a}Genome-editor types abbreviations: SpBE3 = APOBEC1 [31 [10 SpCas9n [31 [0 UGI; VQR-SpBE3 = APOBEC1 [31 [0 VQR-SpCas9n [31 [10 UGI; EQR-SpBE3 = APOBEC1 [31 [10 EQR-SpCas9n [31 [10 UGI; VRER-SpBE3 +32 [10 APOBEC1 [31 [10 VRER-SpCas9n [31 [10 UGI; SaBE3 = APOBEC1 [31 [10 SaCas9n [31 [10 UGI; KKH-SaBE3 +32 [10 APOBEC1 [31 [10 KKH-SaCas9n [31 [10 UGI; St3BE3 = APOBEC1 [31 [10 St3Cas9n [31 [10 UGI; St1BE3 = APOBEC1 [31 [10 St1Cas9n [31 [10 UGI. Guide sequences (the portion of the guide RNA that targets the nucleobase editor to the target sequence) are provided. The guide sequences may be used with any tracrRNA framework sequences known in the art to generate the full guide RNA sequence.

### Cryptic Epitopes

[0178] Some aspects of the present disclosure provide strategies for generating cryptic epitopes in tumor cells. In some embodiments, such strategies involve alterations of splicing sites in a tumor associated antigen gene. Altered splicing site may lead to altered splicing of an mRNA that encodes a tumor associated antigen. One outcome of altered splicing is the translation of an otherwise non-coding region of the gene, leading to otherwise “hidden peptides,” i.e., cryptic epitopes. The splicing site typically comprises an intron donor site, a Lariat branch point, and an intron acceptor site. The mechanism of splicing are familiar to those skilled in the art. The intron donor site has a consensus sequence of GGGTRAGT, and the C bases paired with the G bases in the intron donor site consensus sequence may be targeted by a nucleobase editor, thereby altering the intron donor site. The Lariat branch point also has a consensus sequence, e.g., YTRAC, wherein Y is a pyrimidine, and R is a purine. The C base in the Lariat branch point consensus sequence may be targeted by the nucleobase editors described herein, leading to skipping of the following exon. The intron acceptor site has a consensus sequence of YNCAGG, wherein Y is a pyrimidine, and N is any nucleotide. The C base of the consensus sequence of the intron acceptor site, and the C base paired with the G bases in the consensus sequence of the intron acceptor site may be targeted by the nucleobase editors described herein, thereby altering the intron acceptor site, in turn leading to skipping of an exon. General strategies of altering the splicing sites are described in Table 6.

TABLE 6
Exemplary Alteration of Intron-Exon Junction via Base Editing

| Target | Consensus | Base-editing | Edited | |
|---|---|---|---|---|
| site | Sequence | reaction (s) | sequence | Outcome |
| Intron | GGGTRAGT | 2^{nd} or 3^{rd} base | GAGTRAGT | Intron sequence is |
| donor | (example) | C to T on | (example) | translated as exon, in |
| | | complementary | | frame premature STOP |
| | | strand | | codon |
| Lariat | YTRAC | 5^{th} base C to T | YTRAT | The following exon is |
| branch | (example) | on coding | (example) | skipped from the mature |
| point | | strand | | mRNA, which may affect |
| | | | | the coding frame |
| Intron | Y(rich)NCAGG | 2^{nd} to last base | Y(rich)NCAAG | The exon is skipped from |
| acceptor | (example) | C to T on | (example) | the mature mRNA, which |
| | | complementary | | may affect the coding |
| | | strand | | frame |
| Start | ATG (Met/M) | 3^{rd} base C to T | ATA (Ile/I) | The next ATG is used as |
| codon | | on | | start codon, which may |
| | | complementary | | affect the coding frame |
| | | strand | | |

[0179] Non-limiting, exemplary cryptic epitopes that may be produced using the base editing methods described herein are provided in Table 7.

TABLE 7
Cryptic Epitopes

| Antigen | | | | | | |
|---|---|---|---|---|---|---|
| Name | Cryptic | | | | | |
| and | epitope(s) and | | | | | |
| Exemplary | Genomic target | Programmable guide-RNA | | | gRNA size | Genome |
| Condition(s) | region | sequence | SEQ ID NO | (PAM) | (C-edited) | Editor type^{a} |
| gp100 (PMEL | VYFFLPDHL | UCCCUCACCCCAGGUCUUCC | 752 | (AGAC) | 20 (C9) | VQR-SpBE3 |
| gene) | (SEQ ID NO: | GUCCCUCACCCCAGGUCUUC | 986 | (CAG) | 20 (C9/10) | SpBE3 |
| (melanoma) | 808) | AGAAGGGAGUCCCUCACCCC | 987 | (AGG) | 20 (n.a.) | WT Cas9 |
| | AAGCTTTGTTT | UGUCUGGAAGACCUGGGGUG | 988 | (AGG) | 20 (n.a.) | WT Cas9 |
| | ATGTCTGGAAG | GUCUGGAAGACCUGGGGUGA | 989 | (GGG) | 20 (n.a.) | WT Cas9 |
| | ACCTGGGgtgag | AUGUCUGGAAGACCUGGGGU | 990 | (GAG) | 20 (n.a.) | WT Cas9 |
| | ggactcccttctcagcc | GAGAAGGGAGUCCCUCACCC | 991 | (CAG) | 20 (n.a.) | WT Cas9 |
| | tatcatccacac | | | | | |
| | (SEQ ID NO: | | | | | |
| | 859) | | | | | |
| | intron 4, intron | | | | | |
| | donor site | | | | | |
| gp100 (PMEL | VYFFLPDHL | CCUGAAGUUUUUGGAAUGAA | 753 | (AAG) | 20 (C1/2) | SpBE3 |
| gene) | (SEQ ID NO: | UUGGCCUGAAGUUUUUGGAA | 992 | (TGAA) | 20 (C4/5) | VQR-SpBE3 |
| (melanoma) | 808) | AGUAUUGGCCUGAAGUUUUU | 993 | (GGAA) | 20 (C9/10) | VQR-SpBE3 |
| | ccaaaaacttcgG | CAGUAUUGGCCUGAAGUUUU | 994 | (TGG) | 20 (C10/11) | SpBE3 |
| | CCAATACTGGC | CAGUAUUGGCCUGAAGUUUU | 995 | (TGGAAT) | 20 (C10/11) | SaBE3 |
| | AAGTTCT (SEQ | CUUUUCAUUCCAAAAACUUC | 996 | (AGG) | 20 (n.a.) | WT Cas9 |
| | ID NO: 860) | AACUUGCCAGUAUUGGCCUG | 997 | (AAG) | 20 (n.a.) | WT Cas9 |
| | intron 4, intron | GCUUUUCAUUCCAAAAACUU | 998 | (CAG) | 20 (n.a.) | WT Cas9 |
| | acceptor site | | | | | |
| TYRP1 | MSLQRQFLR | CUCAUUCUGCUUGAAAUAAG | 754 | (AGTG) | 20 (C3) | VQR-SpBE3 |
| (melanoma) | (SEQ ID NO: 809) | ACUCAUUCUGCUUGAAAUAA | 999 | (GAG) | 20 (C4) | SpBE3 |
| | gcactcttatttcaagc | GCACUCAUUCUGCUUGAAAU | 1000 | (AAG) | 20 (C6) | SpBE3 |
| | agaatGagtgctccta | UUAGGAGCACUCAUUCUGCU | 1001 | (TGAA) | 20 (C11) | VQR-SpBE3 |
| | a (SEQ ID NO: | GCACUCAUUCUGCUUGAAAU | 1002 | (AAGAGT) | 20 (C6) | SaBE3 |
| | 861) | UUAGGAGCACUCAUUCUGCU | 1003 | (TGAAAT) | 20 (C11) | KKH-SaBE3 |
| | ORF1, target | CACUCAUUCUGCUUGAAAUA | 1004 | (AGAG) | 20 (C5) | EQR-SpBE3 |
| | start codon | ACUCUUAUUUCAAGCAGAAU | 1005 | (GAG) | 20 (n.a.) | WT Cas9 |
| MGAT5 | VLPDVFIRCV | UGUAAGACAGAAAACCACAC | 755 | (AGCG) | 20 (C-1) | VRER-SpBE3 |
| (melanoma) | (SEQ ID NO: | CUGUAAGACAGAAAACCACA | 1006 | (CAG) | 20 (C1) | SpBE3 |
| | 810) | CAAGUCCAACAAACAACUGU | 1007 | (AAG) | 20 (n.a.) | WT Cas9 |
| | tcatacgctgtgtggtttt | UCUGUCUUACAGUUGUUUGU | 1008 | (TGG) | 20 (n.a.) | WT Cas9 |
| | ctgtcttacagTTGT | | | | | |
| | TTGTTGGACTT | | | | | |
| | GGGTTC (SEQ | | | | | |
| | ID NO: 862) | | | | | |
| | target intron2- | | | | | |
| | exon3 junction, | | | | | |
| | last base of intron | | | | | |
| | 2 | | | | | |
| LAGE-1 | MLMAQEALAFL | CUUCGGCCUGCAUGGCUCCG | 756 | (GAG) | 20 (C11) | SpBE3 |
| (multiple | (SEQ ID NO: | AUGGCUCCGGAGCCUCUGCC | 1009 | (CGG) | 20 (C-1) | SpBE3 |
| tumors, e.g., | 811) | GCCUUCGGCCUGCAUGGCUC | 1010 | (CGG) | 20 (C13) | SpBE3 |
| melanoma | LAAQERRVPR | CCUUCGGCCUGCAUGGCUCC | 1011 | (GGAG) | 20 (C12) | EQR-SpBE3 |
| and breast | (SEQ ID NO: | CAGAGGCUCCGGAGCCAUGC | 1012 | (ACG) | 20 (n.a.) | WT Cas9 |
| cancer) | 812) | GCAGAGGCUCCGGAGCCAUG | 1013 | (CAG) | 20 (n.a.) | WT Cas9 |
| | APRGVRMAV | GCCUUCGGCCUGCAUGGCUC | 1014 | (CGG) | 20 (n.a.) | WT Cas9 |
| | (SEQ ID NO: | | | | | |
| | 813) | | | | | |
| | QGAMLAAQERR | | | | | |
| | VPRAAEVPR | | | | | |
| | (SEQ ID NO: | | | | | |
| | 814) | | | | | |
| | CLSRRPWKRS | | | | | |
| | WSAGSCPGMP | | | | | |
| | HL (SEQ ID NO: | | | | | |
| | 815) | | | | | |
| | tctctgagagccgggc | | | | | |
| | agaggctccggagcc | | | | | |
| | atGcaggccgaagg | | | | | |
| | c (SEQ ID NO: | | | | | |
| | 863) | | | | | |
| | target OFR1 start | | | | | |
| | site | | | | | |
| TRP-2 | EVISCKLIKR | CCUAAUAAUGUAUCUCUAAC | 757 | (AGAA) | 20 (C1/2) | VQR-SpBE3 |
| (melanoma) | (SEQ ID NO: | ACCUAAUAAUGUAUCUCUAA | 1015 | (CAG) | 20 (C2/3) | SpBE3 |
| | 816) | ACCUAAUAAUGUAUCUCUAA | 1016 | (CAGAAT) | 20 (C2/3) | SaBE3 |
| | TATTCTGTTAG | CACCUAAUAAUGUAUCUCUA | 1017 | (ACAGAAT) | 20 (C3/4) | St1BE3 |
| | AGATACATTATT | UUAGAGAUACAUUAUUAGGU | 1018 | (GGG) | 20 (n.a.) | WT Cas9 |
| | AGgtgggttttttcc | GUUAGAGAUACAUUAUUAGG | 1019 | (TGG) | 20 (n.a.) | WT Cas9 |
| | (SEQ ID NO: | | | | | |
| | 864) | | | | | |
| | target intron 2 | | | | | |
| | donor site | | | | | |
| TRP-2 | EVISCKLIKR | UCCUGGUCCUGAAACAAUUG | 758 | (GGAA) | 20 (C8/9) | VQR-SpBE3 |
| (melanoma) | (SEQ ID NO: | GUCCUGGUCCUGAAACAAUU | 1020 | (GGG) | 20 (C9/10) | SpBE3 |
| | 816) | CGUCCUGGUCCUGAAACAAU | 1021 | (TGG) | 20 (C10/11) | SpBE3 |
| | tatgtttcccaattgtttc | UUUCCCAAUUGUUUCAGGAC | 1022 | (CAG) | 20 (n.a.) | WT Cas9 |
| | agGACCAGGAC | UUCCCAAUUGUUUCAGGACC | 1023 | (AGG) | 20 (n.a.) | WT Cas9 |
| | GCCCCT (SEQ | | | | | |
| | ID NO: 865) | | | | | |
| | target intron 2 | | | | | |
| | acceptor site | | | | | |
| BIRC5/Survivin | AYACNTSTL | AGCUGAAGGGAUUAAAGCGG | 759 | (CAG) | 20 (C3) | SpBE3 |
| (multiple | (SEQ ID NO: | GGCAGCUGAAGGGAUUAAAG | 1024 | (CGG) | 20 (C6) | SpBE3 |
| tumors, e.g., | 817) | AAGGCAGCUGAAGGGAUUAA | 1025 | (AGCG) | 20 (C8) | VRER-SpBE3 |
| melanoma, | agtggactgccgcttta | AAAGGCAGCUGAAGGGAUUA | 1026 | (AAG) | 20 (C9) | SpBE3 |
| breast cancer, | atcccttCaGctgcctt | GCAGCUGAAGGGAUUAAAGC | 1027 | (GGCAGT) | 20 (C5) | KKH-SaBE3 |
| and leukemia) | tccgctgtt (SEQ ID | GACUGCCGCUUUAAUCCCUU | 1028 | (CAG) | 20 (n.a.) | WT Cas9 |
| | NO: 866) | CUGCCGCUUUAAUCCCUUCA | 1029 | (GCT) | 20 (n.a.) | WT Cas9 |
| | target intron 2 | | | | | |
| | spliceosome | | | | | |
| | branch site | | | | | |
| BIRC5/Survivin | AYACNTSTL | UCUAGAAAAAUCAAAACAAC | 760 | (AGCG) | 20 (C2) | VRER-SpBE3 |
| (multiple | (SEQ ID NO: | CUCUAGAAAAAUCAAAACAA | 1030 | (CAG) | 20 (C3) | SpBE3 |
| tumors, e.g., | 817) | GAACAUAAAAAGCAUUCGUC | 1031 | (CGG) | 20 (n.a.) | WT Cas9 |
| melanoma, | tccgctgttgttttgattttt | | | | | |
| breast cancer, | ctagAGAGGAAC | | | | | |
| and leukemia) | ATAA (SEQ ID | | | | | |
| | NO: 867) | | | | | |
| | target intron 2 | | | | | |
| | acceptor site | | | | | |
| Bcr-Abl-OOF | SSKALQRPV | UGGAAGAGAAAGGGGGGAAC | 761 | (AGAA) | 20 (C-1) | VQR-SpBE3 |
| (Leukemia) | (SEQ ID NO: | CUGGAAGAGAAAGGGGGGAA | 1032 | (CAG) | 20 (C1) | SpBE3 |
| | 603) | GCUUCUGGAAGAGAAAGGGG | 1033 | (GGAA) | 20 (C5) | VQR-SpBE3 |
| | GFKQSSKAL | GGCUUCUGGAAGAGAAAGGG | 1034 | (GGG) | 20 (C6) | SpBE3 |
| | (SEQ ID NO: | GGGCUUCUGGAAGAGAAAGG | 1035 | (GGG) | 20 (C7) | SpBE3 |
| | 604) | AGGGCUUCUGGAAGAGAAAG | 1036 | (GGG) | 20 (C8) | SpBE3 |
| | ATGFKQSSKAL | AAGGGCUUCUGGAAGAGAAA | 1037 | (GGG) | 20 (C9) | SpBE3 |
| | QRPVAS (SEQ | GAAGGGCUUCUGGAAGAGAA | 1038 | (AGG) | 20 (C10) | SpBE3 |
| | ID NO: 605) | UGAAGGGCUUCUGGAAGAGA | 1039 | (AAG) | 20 (C11) | SpBE3 |
| | ATGFKQSSKAL | UCUGGAAGAGAAAGGGGGGA | 1040 | (ACAGAAA) | 20 (C2) | St1BE3 |
| | QRPVAS (SEQ | AGGGCUUCUGGAAGAGAAAG | 1041 | (GGGGG) | 20 (C8) | St3BE3 |
| | ID NO: 606) | AAGGGCUUCUGGAAGAGAAA | 1042 | (GGGGG) | 20 (C9) | St3BE3 |
| | tcccccctttctcttcca | GAAGGGCUUCUGGAAGAGAA | 1043 | (AGGGG) | 20 (C10) | St3BE3 |
| | gAAGCCCTTCA | UUCCCCCCUUUCUCUUCCAG | 1044 | (AAG) | 20 (n.a.) | WT Cas9 |
| | GC (SEQ ID NO: | CUGUUCCCCCCUUUCUCUUC | 1045 | (CAG) | 20 (n.a.) | WT Cas9 |
| | 868) | | | | | |
| | target intron 1 | | | | | |
| | acceptor site | | | | | |
| Bcr-Abl-OOF | SSKALQRPV | UGAGAAGAAAGGAACCAAAU | 762 | (CAG) | 20 (C-1) | SpBE3 |
| (Leukemia) | (SEQ ID NO: | GCUUUUCACCUGAGAAGAAA | 1046 | (GGAA) | 20 (C9/10) | VQR-SpBE3 |
| | 603) | AGCUUUUCACCUGAGAAGAA | 1047 | (AGG) | 20 (C10/11) | SpBE3 |
| | GFKQSSKAL | GAGCUUUUCACCUGAGAAGA | 1048 | (AAG) | 20 (C11/12) | SpBE3 |
| | (SEQ ID NO: | UUCACCUGAGAAGAAAGGAA | 1049 | (CCAAAT) | 20 (C5/6) | KKH-SaBE3 |
| | 604) | CCGGAGCUUUUCACCUGAGA | 1050 | (AGA) | 20 (C7/8) | SpBE3 |
| | ATGFKQSSKAL | CCCGGAGCUUUUCACCUGAG | 1051 | (AAG) | 20 (C6/7) | SpBE3 |
| | QRPVAS (SEQ | ACCCGGAGCUUUUCACCUGA | 1052 | (GAAGAA) | 20 (C8/9) | KKH-SaBE3 |
| | ID NO: 605) | CACCUGAGAAGAAAGGAACC | 1053 | (AAATC) | 20 (C6/7) | St3BE3 |
| | ATGFKQSSKAL | GAUUUGGUUCCUUUCUUCUC | 1054 | (AGG) | 20 (n.a.) | WT Cas9 |
| | QRPVAS (SEQ | UUCCUUUCUUCUCAGGUGAA | 1055 | (AAG) | 20 (n.a.) | WT Cas9 |
| | ID NO: 606) | UGAUUUGGUUCCUUUCUUCU | 1056 | (CAG) | 20 (n.a.) | WT Cas9 |
| | tcctttcttctcagGTG | | | | | |
| | AAAAGCTCCGG | | | | | |
| | GTCT (SEQ ID | | | | | |
| | NO: 869) | | | | | |
| | target intron 2 | | | | | |
| | acceptor site | | | | | |

^{a}Genome-editor types abbreviations: SpBE3 = APOBEC1 − SpCas9n − UGI; VQR-SpBE3 = APOBEC1 − VQR − SpCas9n − UGI; EQR-SpBE3 = APOBEC1 − EQR − SpCas9n − UGI; VRER-SpBE3 = APOBEC1 − VRER-SpCas9n − UGI; SaBE3 = APOBEC1 − SaCas9n − UGI; KKH-SaBE3 = APOBEC1 − KKH-SaCas9n − UGI; St3BE3 = APOBEC1 − St3Cas9n − UGI; St1BE3 = APOBEC1 − St1Cas9n − UGI. Guide sequences (the portion of the guide RNA that targets the nucleobase editor to the target sequence) are provided. The guide sequences may be used with any tracrRNA framework sequences known in the art to generate the full guide RNA sequence.

[0180] In some embodiments, the nucleobase editor may be used to introduce a premature stop codon (a stop codon that occurs upstream of the normal stop codon) into a tumor specific antigen gene (e.g., TAA, TAG, and TGA). In some embodiments, introduction of a premature stop codon destabilizes the tumor specific antigen. In some embodiments, destabilization of the tumor specific antigen leads to enhanced presentation of immunogenic epitopes (e.g., heteroclitic epitopes or cryptic epitopes).

[0181] Premature stop codons are introduced by changing one or more bases in a target codon that encodes a target residue. For example, nucleobase editors including a cytosine deaminase domain are capable of converting a cytosine (C) base to a thymine (T) base via deamination. Thus, it is envisioned that, for amino acid codons containing a C base, the C base may be converted to T. For example, a CAG (Gln/Q) codon may be changed to a TAG (amber) codon via the deamination of the first C on the coding strand. For sense codons that contain a guanine (G) base, a C base is present on the complementary strand; and the G base may be converted to an adenosine (A) via the deamination of the C on the complementary strand. For example, a TGG (Trp/W) codon may be converted to a TAG (amber) codon via the deamination of the second C on the complementary strand. In some embodiments, two C to T changes are required to convert a codon to a nonsense codon. For example, a CGG (R) codon is converted to a TAG (amber) codon via the deamination of the first C on the coding strand and the deamination of the second C on the complementary strand.

[0182] In some embodiments, the target residue is located in a flexible loop region of the tumor specific antigen. In some embodiments, tandem premature stop codons are introduced. Non-limiting examples of codons that may be changed to stop codons via base editing are provided in Table 8.

TABLE 8
Conversion to Stop Codon

| Target codon | Base-editing process | Edited codon |
|---|---|---|
| CAG (Gln/Q) | 1^{st} base C to T on coding strand | TAG (amber) |
| TGG (Trp/W) | 2^{nd} base C to T on complementary strand | TAG (amber) |
| CGA (Arg/R) | 1^{st} base C to T on coding strand | TGA (opal) |
| CAA (Gln/Q) | 1^{st} base C to T on coding strand | TAA (ochre) |
| TGG (Trp/W) | 3^{rd} base C to T on complementary strand | TGA (opal) |
| CGG (Arg/R) | 1^{st} base C to T on coding strand and 2^{nd} | TAG (amber) |
| | base C to T on complementary strand | |
| CGA (Arg/R) | 1^{st} base C to T on coding strand and 2^{nd} | TAA (orchre) |
| | base C to T on complementary strand | |

* single underline: changes on the coding strand
double underline: changes on the complementary strand

[0183] In some embodiments, cryptic epitopes are generated by shifting the coding frame of a tumor specific antigen gene. In some embodiments, the coding frame is shifted by changing a start codon (ATG) to a sense codon that cannot be used as a start codon. As such, translation will start at the next start codon in the coding region, and the coding frame may be shifted. In some embodiments, a normal sense codon may be edited to generate a start codon to allow translation to start at the newly generated start codon, which may also lead to shifting of the coding frame. Alterations of start codons and the resulting shift in the coding frame generate peptides that would not otherwise be generated from the tumor specific antigen gene (i.e., cryptic epitopes). Non-limiting, exemplary start codon alterations that may be achieved by the nucleobase editors described herein are provided in Table 9.

TABLE 9
Alteration of Start Codons via Base Editing

| Target codon | Base-editing process | Edited codon |
|---|---|---|
| Cognate Start | 3^{rd} base C to T on complementary strand | ATA (Ile/I, next ATG is |
| codon ATG | | used as start codon) |
| (Met/M) | | |
| ACG (Thr/T) | 2^{nd} base C to T on coding strand | ATG (Met/M) |
| GTG (Val/V) | 1^{st} base C to T on complementary strand | ATG (Met/M) |
| GCG (Ala/A) | 1^{st} base C to T on complimentary strand and 2^{nd} | ATG (Met/M) |
| | base C to T on coding strand | |

[0184] The tumor associated antigens listed in Table 5 and Table 6 and their respective gene sequences and protein sequences are known in the art. The amino acid sequence of the listed tumor specific antigens are listed in Table 10.

TABLE 10
Amino acid sequences of human tumor specific antigens

| Name of | | |
|---|---|---|
| tumor | | SEQ |
| associated | | ID |
| antigen | Amino acid sequence | NO |
| Melanocyte | MDLVLKRCLLHLAVIGALLAVGATKVPRNQDWLGVSRQLRTKAWNRQLYPEW | 763 |
| protein PMEL | TEAQRLDCWRGGQVSLKVSNDGPTLIGANASFSIALNFPGSQKVLPDGQVIW | |
| (gp100) | VNNTIINGSQVWGGQPVYPQETDDACIFPDGGPCPSGSWSQKRSFVYVWKTW | |
| | GQYWQVLGGPVSGLSIGTGRAMLGTHTMEVTVYHRRGSRSYVPLAHSSSAFT | |
| | ITDQVPFSVSVSQLRALDGGNKHFLRNQPLTFALQLHDPSGYLAEADLSYTW | |
| | DFGDSSGTLISRALVVTHTYLEPGPVTAQVVLQAAIPLTSCGSSPVPGTTDG | |
| | HRPTAEAPNTTAGQVPTTEVVGTTPGQAPTAEPSGTTSVQVPTTEVISTAPV | |
| | QMPTAESTGMTPEKVPVSEVMGTTLAEMSTPEATGMTPAEVSIVVLSGTTAA | |
| | QVTTTEWVETTARELPIPEPEGPDASSIMSTESITGSLGPLLDGTATLRLVK | |
| | RQVPLDCVLYRYGSFSVTLDIVQGIESAEILQAVPSGEGDAFELTVSCQGGL | |
| | PKEACMEISSPGCQPPAQRLCQPVLPSPACQLVLHQILKGGSGTYCLNVSLA | |
| | DTNSLAVVSTQLIMPGQEAGLGQVPLIVGILLVLMAVVLASLIYRRRLMKQD | |
| | FSVPQLPHSSSHWLRLPRIFCSCPIGENSPLLSGQQV | |
| Melanoma | MPREDAHFIYGYPKKGHGHSYTTAEEAAGIGILTVILGVLLLIGCWYCRRRN | 764 |
| antigen | GYRALMDKSLHVGTQCALTRRCPQEGFDHRDSKVSLQEKNCEPVVPNAPPAY | |
| recognized by | EKLSAEQSPPPYSP | |
| T-cells 1 | | |
| (MLANA/M | | |
| ART-1) | | |
| 5,6- | MSAPKLLSLGCIFFPLLLFQQARAQFPRQCATVEALRSGMCCPDLSPVSGPG | 765 |
| dihydroxyindole-2- | TDRCGSSSGRGRCEAVTADSRPHSPQYPHDGRDDREVWPLRFFNRTCHCNGN | |
| carboxylic | FSGHNCGTCRPGWRGAACDQRVLIVRRNLLDLSKEEKNHFVRALDMAKRTTH | |
| acid oxidase | PLFVIATRRSEEILGPDGNTPQFENISIYNYFVWTHYYSVKKTFLGVGQESF | |
| (TYRP1) | GEVDFSHEGPAFLTWHRYHLLRLEKDMQEMLQEPSFSLPYWNFATGKNVCDI | |
| | CTDDLMGSRSNFDSTLISPNSVFSQWRVVCDSLEDYDTLGTLCNSTEDGPIR | |
| | RNPAGNVARPMVQRLPEPQDVAQCLEVGLFDTPPFYSNSTNSFRNTVEGYSD | |
| | PTGKYDPAVRSLHNLAHLFLNGTGGQTHLSPNDPIFVLLHTFTDAVFDEWLR | |
| | RYNADISTFPLENAPIGHNRQYNMVPFWPPVTNTEMFVTAPDNLGYTYEIQW | |
| | PSREFSVPEIIAIAVVGALLLVALIFGTASYLIRARRSMDEANQPLLTDQYQ | |
| | CYAEEYEKLQNPNQSVV | |
| Alpha-1,6- | MALFTPWKLSSQKLGFFLVTFGFIWGMMLLHFTIQQRTQPESSSMLREQILD | 766 |
| mannosylglycoprotein | LSKRYIKALAEENRNVVDGPYAGVMTAYDLKKTLAVLLDNILQRIGKLESKV | |
| 6-beta-N- | DNLVVNGTGTNSTNSTTAVPSLVALEKINVADIINGAQEKCVLPPMDGYPHC | |
| acetylglucosaminyltransferase A | EGKIKWMKDMWRSDPCYADYGVDGSTCSFFIYLSEVENWCPHLPWRAKNPYE | |
| (MGAT5) | EADHNSLAEIRTDFNILYSMMKKHEEFRWMRLRIRRMADAWIQAIKSLAEKQ | |
| | NLEKRKRKKVLVHLGLLTKESGFKIAETAFSGGPLGELVQWSDLITSLYLLG | |
| | HDIRISASLAELKEIMKKVVGNRSGCPTVGDRIVELIYIDIVGLAQFKKTLG | |
| | PSWVHYQCMLRVLDSFGTEPEFNHANYAQSKGHKTPWGKWNLNPQQFYTMFP | |
| | HTPDNSFLGFVVEQHLNSSDIHHINEIKRQNQSLVYGKVDSFWKNKKIYLDI | |
| | IHTYMEVHATVYGSSTKNIPSYVKNHGILSGRDLQFLLRETKLFVGLGFPYE | |
| | GPAPLEAIANGCAFLNPKFNPPKSSKNTDFFIGKPTLRELTSQHPYAEVFIG | |
| | RPHVWTVDLNNQEEVEDAVKAILNQKIEPYMPYEFTCEGMLQRINAFIEKQD | |
| | FCHGQVMWPPLSALQVKLAEPGQSCKQVCQESQLICEPSFFQHLNKDKDMLK | |
| | YKVTCQSSELAKDILVPSFDPKNKHCVFQGDLLLFSCAGAHPRHQRVCPCRD | |
| | FIKGQVALCKDCL | |
| Cancer/testis | MQAEGRGTGGSTGDADGPGGPGIPDGPGGNAGGPGEAGATGGRGPRGAGAAR | 767 |
| antigen 1 | ASGPGGGAPRGPHGGAASGLNGCCRCGARGPESRLLEFYLAMPFATPMEAEL | |
| (CTAG 1; | ARRSLAQDAPPLPVPGVLLKEFTVSGNILTIRLTAADHRQLQLSISSCLQQL | |
| LAGE2/NY- | SLLMWITQCFLPVFLAQPPSGQRR | |
| ESO-1) | | |
| CTL- | MLMAQEALAFLMAQGAMLAAQERRVPRAAEVPGAQGQQGPRGREEAPRGVRM | 768 |
| recognized | AVPLLRRMEGAPAGPGGRTAACFSCTSRCLSRRPWKRSWSAGSCPGMPHLSP | |
| antigen on | DQGRF | |
| melanoma | | |
| (CAMEL) | | |
| L- | MSPLWWGFLLSCLGCKILPGAQGQFPRVCMTVDSLVNKECCPRLGAESANVC | 769 |
| dopachrome | GSQQGRGQCTEVRADTRPWSGPYILRNQDDRELWPRKFFHRTCKCTGNFAGY | |
| tautomerase | NCGDCKFGWTGPNCERKKPPVIRQNIHSLSPQEREQFLGALDLAKKRVHPDY | |
| (DCT) | VITTQHWLGLLGPNGTQPQFANCSVYDFFVWLHYYSVRDTLLGPGRPYRAID | |
| | FSHQGPAFVTWHRYHLLCLERDLQRLIGNESFALPYWNFATGRNECDVCTDQ | |
| | LFGAARPDDPTLISRNSRFSSWETVCDSLDDYNHLVTLCNGTYEGLLRRNQM | |
| | GRNSMKLPTLKDIRDCLSLQKFDNPPFFQNSTFSFRNALEGFDKADGTLDSQ | |
| | VMSLHNLVHSFLNGTNALPHSAANDPIFVVLHSFTDAIFDEWMKRFNPPADA | |
| | WPQELAPIGHNRMYNMVPFFPPVTNEELFLTSDQLGYSYAIDLPVSVEETPG | |
| | WPTTLLVVMGTLVALVGLFVLLAFLQYRRLRKGYTPLMETHLSSKRYTEEA | |
| Tyrosinase | MLLAVLYCLLWSFQTSAGHFPRACVSSKNLMEKECCPPWSGDRSPCGQLSGR | 770 |
| (TYR) | GSCQNILLSNAPLGPQFPFTGVDDRESWPSVFYNRTCQCSGNFMGFNCGNCK | |
| | FGFWGPNCTERRLLVRRNIFDLSAPEKDKFFAYLTLAKHTISSDYVIPIGTY | |
| | GQMKNGSTPMFNDINIYDLFVWMHYYVSMDALLGGSEIWRDIDFAHEAPAFL | |
| | PWHRLFLLRWEQEIQKLTGDENFTIPYWDWRDAEKCDICTDEYMGGQHPTNP | |
| | NLLSPASFFSSWQIVCSRLEEYNSHQSLCNGTPEGPLRRNPGNHDKSRTPRL | |
| | PSSADVEFCLSLTQYESGSMDKAANFSFRNTLEGFASPLTGIADASQSSMHN | |
| | ALHIYMNGTMSQVQGSANDPIFLLHHAFVDSIFEQWLRRHRPLQEVYPEANA | |
| | PIGHNRESYMVPFIPLYRNGDFFISSKDLGYDYSYLQDSDPDSFQDYIKSYL | |
| | EQASRIWSWLLGAAMVGAVLTALLAGLVSLLCRHKRKQLPEEKQPLLMEKED | |
| | YHSLYQSHL | |
| B aculoviral | MGAPTLPPAWQPFLKDHRISTFKNWPFLEGCACTPERMAEAGFIHCPTENEP | 771 |
| IAP repeat- | DLAQCFFCFKELEGWEPDDDPIEEHKKHSSGCAFLSVKKQFEELTLGEFLKL | |
| containing | DRERAKNKIAKETNNKKKEFEETAKKVRRAIEQLAAMD | |
| protein 5 | | |
| (BIRC5) | | |
| Receptor | MELAALCRWGLLLALLPPGAASTQVCTGTDMKLRLPASPETHLDMLRHLYQG | 772 |
| tyrosine- | CQVVQGNLELTYLPTNASLSFLQDIQEVQGYVLIAHNQVRQVPLQRLRIVRG | |
| protein kinase | TQLFEDNYALAVLDNGDPLNNTTPVTGASPGGLRELQLRSLTEILKGGVLIQ | |
| erbB-2 | RNPQLCYQDTILWKDIFHKNNQLALTLIDTNRSRACHPCSPMCKGSRCWGES | |
| (ERB B 2/HER | SEDCQSLTRTVCAGGCARCKGPLPTDCCHEQCAAGCTGPKHSDCLACLHFNH | |
| 2) | SGICELHCPALVTYNTDTFESMPNPEGRYTFGASCVTACPYNYLSTDVGSCT | |
| | LVCPLHNQEVTAEDGTQRCEKCSKPCARVCYGLGMEHLREVRAVTSANIQEF | |
| | AGCKKIFGSLAFLPESFDGDPASNTAPLQPEQLQVFETLEEITGYLYISAWP | |
| | DSLPDLSVFQNLQVIRGRILHNGAYSLTLQGLGISWLGLRSLRELGSGLALI | |
| | HHNTHLCFVHTVPWDQLFRNPHQALLHTANRPEDECVGEGLACHQLCARGHC | |
| | WGPGPTQCVNCSQFLRGQECVEECRVLQGLPREYVNARHCLPCHPECQPQNG | |
| | SVTCFGPEADQCVACAHYKDPPFCVARCPSGVKPDLSYMPIWKFPDEEGACQ | |
| | PCPINCTHSCVDLDDKGCPAEQRASPLTSIISAVVGILLVVVLGVVFGILIK | |
| | RRQQKIRKYTMRRLLQETELVEPLTPSGAMPNQAQMRILKETELRKVKVLGS | |
| | GAFGTVYKGIWIPDGENVKIPVAIKVLRENTSPKANKEILDEAYVMAGVGSP | |
| | YVSRLLGICLTSTVQLVTQLMPYGCLLDHVRENRGRLGSQDLLNWCMQIAKG | |
| | MSYLEDVRLVHRDLAARNVLVKSPNHVKITDFGLARLLDIDETEYHADGGKV | |
| | PIKWMALESILRRRFTHQSDVWSYGVTVWELMTFGAKPYDGIPAREIPDLLE | |
| | KGERLPQPPICTIDVYMIMVKCWMIDSECRPRFRELVSEFSRMARDPQRFVV | |
| | IQNEDLGPASPLDSTFYRSLLEDDDMGDLVDAEEYLVPQQGFFCPDPAPGAG | |
| | GMVHHRHRSSSTRSGGGDLTLGLEPSEEEAPRSPLAPSEGAGSDVFDGDLGM | |
| | GAAKGLQSLPTHDPSPLQRYSEDPTVPLPSETDGYVAPLTCSPQPEYVNQPD | |
| | VRPQPPSPREGPLPAARPAGATLERPKTLSPGKNGVVKDVFAFGGAVENPEY | |
| | LTPQGGAAPQPHPPPAFSPAFDNLYYWDQDPPERGAPPSTFKGTPTAENPEY | |
| | LGLDVPV | |
| Myeloid cell | MPLLLLLPLLWAGALAMDPNFWLQVQESVTVQEGLCVLVPCTFFHPIPYYDK | 773 |
| surface | NSPVHGYWFREGAIISRDSPVATNKLDQEVQEETQGRFRLLGDPSRNNCSLS | |
| antigen CD33 | IVDARRRDNGSYFFRMERGSTKYSYKSPQLSVHVTDLTHRPKILIPGTLEPG | |
| | HSKNLTCSVSWACEQGTPPIFSWLSAAPTSLGPRTTHSSVLIITPRPQDHGT | |
| | NLTCQVKFAGAGVTTERTIQLNVTYVPQNPTTGIFPGDGSGKQETRAGVVHG | |
| | AIGGAGVTALLALCLCLIFFIVKTHRRKAARTAVGRNDTHPTTGSASPKHQK | |
| | KSKLHGPTETSSCSGAAPTVEMDEELHYASLNFHGMNPSKDTSTEYSEVRTQ | |
| Telomerase | MPRAPRCRAVRSLLRSHYREVLPLATFVRRLGPQGWRLVQRGDPAAFRALVA | 774 |
| reverse | QCLVCVPWDARPPPAAPSFRQVSCLKELVARVLQRLCERGAKNVLAFGFALL | |
| transcriptase | DGARGGPPEAFTTSVRSYLPNTVTDALRGSGAWGLLLRRVGDDVLVHLLARC | |
| (TERT) | ALFVLVAPSCAYQVCGPPLYQLGAATQARPPPHASGPRRRLGCERAWNHSVR | |
| | EAGVPLGLPAPGARRRGGSASRSLPLPKRPRRGAAPEPERTPVGQGSWAHPG | |
| | RTRGPSDRGFCVVSPARPAEEATSLEGALSGTRHSHPSVGRQHHAGPPSTSR | |
| | PPRPWDTPCPPVYAETKHFLYSSGDKEQLRPSFLLSSLRPSLTGARRLVETI | |
| | FLGSRPWMPGTPRRLPRLPQRYWQMRPLFLELLGNHAQCPYGVLLKTHCPLR | |
| | AAVTPAAGVCAREKPQGSVAAPEEEDTDPRRLVQLLRQHSSPWQVYGFVRAC | |
| | LRRLVPPGLWGSRHNERRFLRNTKKFISLGKHAKLSLQELTWKMSVRDCAWL | |
| | RRSPGVGCVPAAEHRLREEILAKFLHWLMSVYVVELLRSFFYVTETTFQKNR | |
| | LFFYRKSVWSKLQSIGIRQHLKRVQLRELSEAEVRQHREARPALLTSRLRFI | |
| | PKPDGLRPIVNMDYVVGARTFRREKRAERLTSRVKALFSVLNYERARRPGLL | |
| | GASVLGLDDIHRAWRTFVLRVRAQDPPPELYFVKVDVTGAYDTIPQDRLTEV | |
| | IASIIKPQNTYCVRRYAVVQKAAHGHVRKAFKSHVSTLTDLQPYMRQFVAHL | |
| | QETSPLRDAVVIEQSSSLNEASSGLFDVFLRFMCHHAVRIRGKSYVQCQGIP | |
| | QGSILSTLLCSLCYGDMENKLFAGIRRDGLLLRLVDDFLLVTPHLTHAKTFL | |
| | RTLVRGVPEYGCVVNLRKTVVNFPVEDEALGGTAFVQMPAHGLFPWCGLLLD | |
| | TRTLEVQSDYSSYARTSIRASLTFNRGFKAGRNMRRKLFGVLRLKCHSLFLD | |
| | LQVNSLQTVCTNIYKILLLQAYRFHACVLQLPFHQQVWKNPTFFLRVISDTA | |
| | SLCYSILKAKNAGMSLGAKGAAGPLPSEAVQWLCHQAFLLKLTRHRVTYVPL | |
| | LGSLRTAQTQLSRKLPGTTLTALEAAANPALPSDFKTILD | |
| Protein SSX2 | MNGDDAFARRPTVGAQIPEKIQKAFDDIAKYFSKEEWEKMKASEKIFYVYMK | 775 |
| | RKYEAMTKLGFKATLPPFMCNKRAEDFQGNDLDNDPNRGNQVERPQMTFGRL | |
| | QGISPKIMPKKPAEEGNDSEEVPEASGPQNDGKELCPPGKPTTSEKIHERSG | |
| | PKRGEHAWTHRLRERKQLVIYEEISDPEEDDE | |
| Wilms tumor | MGSDVRDLNALLPAVPSLGGGGGCALPVSGAAQWAPVLDFAPPGASAYGSLG | 776 |
| protein (WT1) | GPAPPPAPPPPPPPPPHSFIKQEPSWGGAEPHEEQCLSAFTVHFSGQFTGTA | |
| | GACRYGPFGPPPPSQASSGQARMFPNAPYLPSCLESQPAIRNQGYSTVTFDG | |
| | TPSYGHTPSHHAAQFPNHSFKHEDPMGQQGSLGEQQYSVPPPVYGCHTPTDS | |
| | CTGSQALLLRTPYSSDNLYQMTSQLECMTWNQMNLGATLKGVAAGSSSSVKW | |
| | TEGQSNHSTGYESDNHTTPILCGAQYRIHTHGVFRGIQDVRRVPGVAPTLVR | |
| | SASETSEKRPFMCAYPGCNKRYFKLSHLQMHSRKHTGEKPYQCDFKDCERRF | |
| | SRSDQLKRHQRRHTGVKPFQCKTCQRKFSRSDHLKTHTRTHTGKTSEKPFSC | |
| | RWPSCQKKFARSDELVRHHNMHQRNMTKLQLAL | |
| Sperm- | MRQRLLPSVTSLLLVALLFPGSSQARHVNHSATEALGELRERAPGQGTNGFQ | 777 |
| associated | LLRHAVKRDLLPPRTPPYQVHISHQEARGPSFKICVGFLGPRWARGCSTGNE | |
| antigen 11A | KYHLPYAARDLQTFFLPFW | |
| (SPAG11A) | | |
| BCR/ABL | MVDPVGFAEAWKAQFPDSEPPRMELRSVGDIEQELERCKASIRRLEQEVNQE | 778 |
| fusion protein | RFRMIYLQTLLAKEKKSYDRQRWGFRRAAQAPDGASEPRASASRPQPAPADG | |
| isoform X3 | ADPPPAEEPEARPDGEGSPGKARPGTARRPGAAASGERDDRGPPASVAALRS | |
| | NFERIRKGHGQPGADAEKPFYVNVEFHHERGLVKVNDKEVSDRISSLGSQAM | |
| | QMERKKSQHGAGSSVGDASRPPYRGRSSESSCGVDGDYEDAELNPRFLKDNL | |
| | IDANGGSRPPWPPLEYQPYQSIYVGGMMEGEGKGPLLRSQSTSEQEKRLTWP | |
| | RRSYSPRSFEDCGGGYTPDCSSNENLTSSEEDFSSGQSSRVSPSPTTYRMFR | |
| | DKSRSPSQNSQQSFDSSSPPTPQCHKRHRHCPVVVSEATIVGVRKTGQIWPN | |
| | DGEGAFHGDADGSFGTPPGYGCAADRAEEQRRHQDGLPYIDDSPSSSPHLSS | |
| | KGRGSRDALVSGALESTKASELDLEKGLEMRKWVLSGILASEETYLSHLEAL | |
| | LLPMKPLKAAATTSQPVLTSQQIETIFFKVPELYEIHKEFYDGLFPRVQQWS | |
| | HQQRVGDLFQKLASQLGVYRVLGYNHNGEWCEAQTKNGQGWVPSNYITPVNS | |
| | LEKHSWYHGPVSRNAAEYLLSSGINGSFLVRESESSPGQRSISLRYEGRVYH | |
| | YRINTASDGKLYVSSESRFNTLAELVHHHSTVADGLITTLHYPAPKRNKPTV | |
| | YGVSPNYDKWEMERTDITMKHKLGGGQYGEVYEGVWKKYSLTVAVKTLKEDT | |
| | MEVEEFLKEAAVMKEIKHPNLVQLLGVCTREPPFYIITEFMTYGNLLDYLRE | |
| | CNRQEVNAVVLLYMATQISSAMEYLEKKNFIHRDLAARNCLVGENHLVKVAD | |
| | FGLSRLMTGDTYTAHAGAKFPIKWTAPESLAYNKFSIKSDVWAFGVLLWEIA | |
| | TYGMSPYPGIDLSQVYELLEKDYRMERPEGCPEKVYELMRACWQWNPSDRPS | |
| | FAEIHQAFETMFQESSISDEVEKELGKQGVRGAVSTLLQAPELPTKTRTSRR | |
| | AAEHRDTTDVPEMPHSKGQGESDPLDHEPAVSPLLPRKERGPPEGGLNEDER | |
| | LLPKDKKTNLFSALIKKKKKTAPTPPKRSSSFREMDGQPERRGAGEEEGRDI | |
| | SNGALAFTPLDTADPAKSPKPSNGAGVPNGALRESGGSGFRSPHLWKKSSTL | |
| | ISSRLATGEEEGGGSSSKRFLRSCSASCVPHGAKDTEWRSVTLPRDLQSTGR | |
| | QFDSSTFGGHKSEKPALPRKRAGENRSDQVTRGTVTPPPRLVKKNEEAADEV | |
| | FKDIMESSPGSSPPNLTPKPLRRQVTVAPASGLPHKEEAGKGSALGTPAAAE | |
| | PVTPTSKAGSGAPGGTSKGPAEESRVRRHKHSSESPGRDKGKLSRLKPAPPP | |
| | PPAASAGKAGGKPSQSPSQEAAGEAVLGAKTKATSLVDAVNSDAAKPSQPGE | |
| | GLKKPVLPATPKPQSAKPSGTPISPAPVPSTLPSASSALAGDQPSSTAFIPL | |
| | ISTRVSLRKTRQPPERIASGAITKGVVLDSTEALCLAISRNSEQMASHSAVL | |
| | EAGKNLYTFCVSYVDSIQQMRNKFAFREAINKLENNLRELQICPATAGSGPA | |
| | ATQDFSKLLSSVKEISDIVQR | |
| Carcinoembryonic | MESPSAPPHRWCIPWQRLLLTASLLTFWNPPTTAKLTIESTPFNVAEGKEVL | 779 |
| antigen- | LLVHNLPQHLFGYSWYKGERVDGNRQIIGYVIGTQQATPGPAYSGREIIYPN | |
| related cell | ASLLIQNIIQNDTGFYTLHVIKSDLVNEEATGQFRVYPELPKPSISSNNSKP | |
| adhesion | VEDKDAVAFTCEPETQDATYLWWVNNQSLPVSPRLQLSNGNRTLTLFNVTRN | |
| molecule 5 | DTASYKCETQNPVSARRSDSVILNVLYGPDAPTISPLNTSYRSGENLNLSCH | |
| (CEACAM5) | AASNPPAQYSWFVNGTFQQSTQELFIPNITVNNSGSYTCQAHNSDTGLNRTT | |
| | VTTITVYAEPPKPFITSNNSNPVEDEDAVALTCEPEIQNTTYLWWVNNQSLP | |
| | VSPRLQLSNDNRTLTLLSVTRNDVGPYECGIQNKLSVDHSDPVILNVLYGPD | |
| | DPTISPSYTYYRPGVNLSLSCHAASNPPAQYSWLIDGNIQQHTQELFISNIT | |
| | EKNSGLYTCQANNSASGHSRTTVKTITVSAELPKPSISSNNSKPVEDKDAVA | |
| | FTCEPEAQNTTYLWWVNGQSLPVSPRLQLSNGNRTLTLFNVTRNDARAYVCG | |
| | IQNSVSANRSDPVTLDVLYGPDTPIISPPDSSYLSGANLNLSCHSASNPSPQ | |
| | YSWRINGIPQQHTQVLFIAKITPNNNGTYACFVSNLATGRNNSIVKSITVSA | |
| | SGTSPGLSAGATVGIMIGVLVGVALI | |
| Melanoma | MPLEQRSQHCKPEEGLEARGEALGLVGAQAPATEEQEAASSSSTLVEVTLGE | 780 |
| antigen, | VPAAESPDPPQSPQGASSLPTTMNYPLWSQSYEDSSNQEEEGPSTFPDLESE | |
| family A, 3 | FQAALSRKVAELVHFLLLKYRAREPVTKAEMLGSVVGNWQYFFPVIFSKAFS | |
| variant | SLQLVFGIELMEVDPIGHLYIFATCLGLSYDGLLGDNQIMPKAGLLIIVLAI | |
| (MAGE-A3) | IAREGDCAPEEKIWEELSVLEVFEGREDSILGDPKKLLTQHFVQENYLEYRQ | |
| | VPGSDPACYEFLWGPRALVETSYVKVLHHMVKISGGPHISYPPLHEWVLREG | |
| | EE | |
| Mucin-1 | MTPGTQSPFFLLLLLTVLTVVTGSGHASSTPGGEKETSATQRSSVPSSTEKN | 781 |
| (MUC1) | AVSMTSSVLSSHSPGSGSSTTQGQDVTLAPATEPASGSAATWGQDVTSVPVT | |
| | RPALGSTTPPAHDVTSAPDNKPAPGSTAPPAHGVTSAPDTRPAPGSTAPPAH | |
| | GVTSAPDTRPAPGSTAPPAHGVTSAPDTRPAPGSTAPPAHGVTSAPDTRPAP | |
| | GSTAPPAHGVTSAPDTRPAPGSTAPPAHGVTSAPDTRPAPGSTAPPAHGVTS | |
| | APDTRPAPGSTAPPAHGVTSAPDTRPAPGSTAPPAHGVTSAPDTRPAPGSTA | |
| | PPAHGVTSAPDTRPAPGSTAPPAHGVTSAPDTRPAPGSTAPPAHGVTSAPDT | |
| | RPAPGSTAPPAHGVTSAPDTRPAPGSTAPPAHGVTSAPDTRPAPGSTAPPAH | |
| | GVTSAPDTRPAPGSTAPPAHGVTSAPDTRPAPGSTAPPAHGVTSAPDTRPAP | |
| | GSTAPPAHGVTSAPDTRPAPGSTAPPAHGVTSAPDTRPAPGSTAPPAHGVTS | |
| | APDTRPAPGSTAPPAHGVTSAPDTRPAPGSTAPPAHGVTSAPDTRPAPGSTA | |
| | PPAHGVTSAPDTRPAPGSTAPPAHGVTSAPDTRPAPGSTAPPAHGVTSAPDT | |
| | RPAPGSTAPPAHGVTSAPDTRPAPGSTAPPAHGVTSAPDTRPAPGSTAPPAH | |
| | GVTSAPDTRPAPGSTAPPAHGVTSAPDTRPAPGSTAPPAHGVTSAPDTRPAP | |
| | GSTAPPAHGVTSAPDTRPAPGSTAPPAHGVTSAPDTRPAPGSTAPPAHGVTS | |
| | APDTRPAPGSTAPPAHGVTSAPDTRPAPGSTAPPAHGVTSAPDTRPAPGSTA | |
| | PPAHGVTSAPDTRPAPGSTAPPAHGVTSAPDTRPAPGSTAPPAHGVTSAPDT | |
| | RPAPGSTAPPAHGVTSAPDTRPAPGSTAPPAHGVTSAPDTRPAPGSTAPPAH | |
| | GVTSAPDNRPALGSTAPPVHNVTSASGSASGSASTLVHNGTSARATTTPASK | |
| | STPFSIPSHHSDTPTTLASHSTKTDASSTHHSSVPPLTSSNHSTSPQLSTGV | |
| | SFFFLSFHISNLQFNSSLEDPSTDYYQELQRDISEMFLQIYKQGGFLGLSNI | |
| | KFRPGSVVVQLTLAFREGTINVHDVETQFNQYKTEAASRYNLTISDVSVSDV | |
| | PFPFSAQSGAGVPGWGIALLVLVCVLVALAIVYLIALAVCQCRRKNYGQLDI | |
| | FPARDTYHPMSEYPTYHTHGRYVPPSSTDRSPYEKVSAGNGGSSLSYTNPAV | |
| | AATSANL | |
| Epithelial cell | MAPPQVLAFGLLLAAATATFAAAQEECVCENYKLAVNCFVNNNRQCQCTSVG | 782 |
| adhesion | AQNTVICSKLAAKCLVMKAEMNGSKLGRRAKPEGALQNNDGLYDPDCDESGL | |
| molecule | FKAKQCNGTSMCWCVNTAGVRRTDKDTEITCSERVRTYWIIIELKHKAREKP | |
| precursor | YDSKSLRTALQKEITTRYQLDPKFITSILYENNVITIDLVQNSSQKTQNDVD | |
| (EpCAM) | IADVAYYFEKDVKGESLFHSKKMDLTVNGEQLDLDPGQTLIYYVDEKAPEFS | |
| | MQGLKAGVIAVIVVVVIAVVAGIVVLVISRKKRMAKYEKAEIKEMGEMHREL | |
| | NA | |

[0185] In some embodiments, cancer vaccines containing immunogenic peptides from tumor specific antigens (e.g., heteroclitic epitopes and cryptic epitopes) are generated in vivo (e.g., in tumor cells in a subject) or ex vivo (e.g., in tumor cells isolated from a subject). In some embodiments, the tumor cells are treated with the nucleobase editors to generate the immunogenic peptides and are irradiated and administered to the subject as whole-cell cancer vaccines.

[0186] To edit the genes encoding the tumor associated antigens, the nucleobase editor and/or the guide nucleotide sequence is introduced into the cell (e.g., a tumor cell) where the editing occurs. In some embodiments, nucleic acid molecules (e.g., expression vectors) encoding the nucleobase editors and/or the guide nucleotide sequences are delivered into the cell, resulting in co-expression of nucleobase editors and/or the guide nucleotide sequences in the cell. The nucleic acid molecules encoding the nucleobase editors and/or the guide nucleotide sequences may be delivered into the cell using any known methods in the art, e.g., transfection (e.g., transfection mediated by cationic liposomes), transduction (e.g., via viral infection) and electroporation. In some embodiments, an isolated nucleobase editor/gRNA complex is delivered. Methods of delivering an isolated protein to a cell is familiar to those skilled in the art. For example, the isolated nucleobase editor in complex with a gRNA be associated with a supercharged, cell-penetrating protein or peptide, which facilitates its entry into a cell (e.g., as described in PCT Application Publication WO2010129023 and US Patent Application Publication US20150071906, incorporated herein by reference). In some embodiments, the isolated nucleobase editor in complex with a gRNA may be delivered by a cationic transfection reagent, e.g., the Lipofectamine CRISPRMAX Cas9 Transfection Reagent from Thermofisher Scientific. In some embodiments, the nucleobase editor and the gRNA may be delivered separately. Other suitable delivery methods may also be used, e.g., AAV mediated gene transfer. Strategies for delivery a Cas9-based genome editing agent (e.g., the nucleobase editor described herein) using AAV have been described, e.g., in Zetsche et al., Nature Biotechnology 33, 139-142 (2015), incorporated herein by reference.

[0187] In some embodiments, once generated, the immunogenic peptide is displayed on the surface of the tumor cell via the MHC class I antigen presentation pathway. In some embodiments, the immunogenic peptide is displayed on the surface of an antigen presenting cell (APC) via the MHC class II antigen presentation pathway. In some embodiments, the APC is selected from the group consisting of: tumor cells, dendritic cells, mononuclear phagocytes, thymic epithelial cells, and B cells. In some embodiments, the immunogenic peptide elicits an adaptive immune response against the tumor-specific antigen where the peptide is derived from. In some embodiments, the immunogenic peptide elicits an adaptive immune response against the tumor. In some embodiments, the adaptive immune response comprises promoting the maturation of dendritic cells, activation of CD4+ T lymphocytes, (T helper cells) activation of CD8+ T lymphocytes (cytotoxic T cells), activation and maturation of B lymphocytes, and/or production of tumor antigen-specific antibodies.

[0188] T helper cells (TH cells) assist other white blood cells in immunologic processes, including maturation of B cells into plasma cells and memory B cells, and activation of cytotoxic T cells and macrophages. These cells are also known as CD4+ T cells because they express the CD4 glycoprotein on their surfaces. Helper T cells become activated when they are presented with peptide antigens by MHC class II molecules, which are expressed on the surface of antigen-presenting cells (APCs). Once activated, they divide rapidly and secrete small proteins called cytokines that regulate or assist in the active immune response. These cells can differentiate into one of several subtypes, including TH1, TH2, TH3, TH17, TH9, or TFH, which secrete different cytokines to facilitate different types of immune responses. Signaling from the APC directs T cells into particular subtypes.

[0189] Cytotoxic T cells (e.g., TC cells, CTLs, T-killer cells, killer T cells) destroy virus-infected cells and tumor cells, and are also implicated in transplant rejection. These cells are also known as CD8+ T cells since they express the CD8 glycoprotein at their surfaces. These cells recognize their targets by binding to antigen associated with MHC class I molecules, which are present on the surface of all nucleated cells. Through IL-10, adenosine, and other molecules secreted by regulatory T cells, the CD8+ cells can be inactivated to an anergic state, which prevents autoimmune diseases.

[0190] Most cytotoxic T cells express T-cell receptors (TCRs) that can recognize a specific antigen. Antigens inside a cell are bound to class I MHC molecules, and brought to the surface of the cell by the class I MHC molecule, where they can be recognized by the T cell. If the TCR is specific for that antigen, it binds to the complex of the class I MHC molecule and the antigen, and the T cell destroys the cell, e.g., via inducing apoptosis. In order for the TCR to bind to the class I MHC molecule, the former must be accompanied by a glycoprotein called CD8, which binds to the constant portion of the class I MHC molecule. Therefore, these T cells are called CD8+ T cells.

[0191] Natural killer T cells (NKT cells—not to be confused with natural killer cells of the innate immune system) bridge the adaptive immune system with the innate immune system. Unlike conventional T cells that recognize peptide antigens presented by major histocompatibility complex (MHC) molecules, NKT cells recognize glycolipid antigen presented by a molecule called CD1d. Once activated, these cells can perform functions ascribed to both Th and Tc cells (i.e., cytokine production and release of cytolytic/cell killing molecules). They are also able to recognize and eliminate some tumor cells and cells infected with microorganisms, e.g., bacteria or virus.

[0192] Memory T cells are a subset of antigen-specific T cells that persist long-term after an initial T cell response. They quickly expand to large numbers of effector T cells upon re-exposure to their cognate antigen, thus providing the immune system with “memory” against past antigens. The cancer vaccine described herein provides the immune system with “memory” against the tumor specific antigen, thereby eliciting strong immune response against newly emerged cancer cells or metastasized cancer cells.

[0193] Regulatory T cells (suppressor T cells) are crucial for the maintenance of immunological tolerance. Their major role is to shut down T cell-mediated immunity toward the end of an immune reaction and to suppress autoreactive T cells that escaped the process of negative selection in the thymus. Suppressor T cells along with Helper T cells can collectively be called Regulatory T cells due to their regulatory functions.

[0194] B cell activation occurs in the secondary lymphoid organs (SLOs), such as the spleen and lymph nodes. After B cells mature in the bone marrow, they migrate through the blood to SLOs, which receive a constant supply of antigen through circulating lymph. At the SLO, B cell activation begins when the B cell binds to an antigen via its BCR. The antigen can either be free-floating or presented by APCs such as macrophages or dendritic cells (DCs), and include proteins, glycoproteins, polysaccharides, whole virus particles, and whole bacterial cells. Some subtypes of B cell preferentially undergo T cell-dependent activation while other subtypes of cells preferentially undergo T cell-independent activation.

[0195] Antigens that activate B cells with the help of T-cell are known as T cell-dependent (TD) antigens and include foreign proteins. They are named as such because they are unable to induce a humoral response in organisms that lack T cells. B cell response to these antigens takes multiple days, though antibodies generated have a higher affinity and are more functionally versatile than those generated from T cell-independent activation.

[0196] Once a BCR binds a TD antigen, the antigen is taken up into the B cell through receptor-mediated endocytosis, degraded, and presented to T cells as peptide pieces in complex with MHC-II molecules on the cell membrane. T helper (TH) cells, typically follicular T helper (TFH) cells, that were activated with the same antigen recognize and bind these MHC-II-peptide complexes through their T cell receptor (TCR). Following TCR-MHC-II-peptide binding, T cells express the surface protein CD40L as well as cytokines such as IL-4 and IL-21. CD40L serves as a necessary co-stimulatory factor for B cell activation by binding the B cell surface receptor CD40, which promotes B cell proliferation, immunoglobulin class switching, and somatic hypermutation as well as sustains T cell growth and differentiation. T cell-derived cytokines bound by B cell cytokine receptors also promote B cell proliferation, immunoglobulin class switching, and somatic hypermutation as well as guide differentiation. After B cells receive these signals, they are considered activated.

[0197] Activated B cells participate in a two-step differentiation process that yields both short-lived plasmablasts for immediate protection and long-lived plasma cells and memory B cells for persistent protection. The first step, known as the extrafollicular response, occurs outside of lymphoid follicles but still in the SLO. During this step activated B cells proliferate, may undergo immunoglobulin class switching, and differentiate into plasmablasts that produce early, weak antibodies mostly of class IgM. The second step consists of activated B cells entering a lymphoid follicle and forming a germinal center (GC), which is a specialized microenvironment where B cells undergo extensive proliferation, immunoglobulin class switching, and affinity maturation directed by somatic hypermutation. These processes are facilitated by TFH cells within the GC and generate both high-affinity memory B cells and long-lived plasma cells. Resultant plasma cells secrete large amounts of antibody and either stay within the SLO or, more preferentially, migrate to bone marrow.

[0198] Antigens that activate B cells without T cell help are known as T cell-independent (TI) antigens and include foreign polysaccharides and unmethylated CpG DNA. They are named as such because they are able to induce a humoral response in organisms that lack T cells. B cell response to these antigens is rapid, though antibodies generated tend to have lower affinity and are less functionally versatile than those generated from T cell-dependent activation.

[0199] As with TD antigens, B cells activated by TI antigens need additional signals to complete activation, but instead of receiving them from T cells, they are provided either by recognition and binding of a common microbial constituent to toll-like receptors (TLRs) or by extensive crosslinking of BCRs to repeated epitopes on a bacterial cell. B cells activated by TI antigens go on to proliferate outside of lymphoid follicles but still in SLOs (GCs do not form), possibly undergo immunoglobulin class switching, and differentiate into short-lived plasmablasts that produce early, weak antibodies mostly of class IgM, but also some populations of long-lived plasma cells.

[0200] Memory B cell activation begins with the detection and binding of their target antigen, which is shared by their parent B cell. Some memory B cells can be activated without T cell help, such as certain virus-specific memory B cells, but others need T cell help. Upon antigen binding, the memory B cell takes up the antigen through receptor-mediated endocytosis, degrades it, and presents it to T cells as peptide pieces in complex with MHC-II molecules on the cell membrane. Memory T helper (TH) cells, typically memory follicular T helper (TFH) cells, that were derived from T cells activated with the same antigen recognize and bind these MHC-II-peptide complexes through their TCR. Following TCR-MHC-II-peptide binding and the relay of other signals from the memory TFH cell, the memory B cell is activated and differentiates either into plasmablasts and plasma cells via an extrafollicular response or enter a germinal center reaction where they generate plasma cells and more memory B cells.

[0201] In some embodiments, the adaptive immune response results in the killing tumor cells, reducing tumor burden, reducing tumor size, and/or preventing metastasis. In some embodiments, the adaptive immune response is active against neo-epitopes associated with spontaneous somatic mutations. In some embodiments, the neo-epitope is specific to the lineage of tumor cells.

[0202] In some embodiments, the adaptive immune response elicited by the heteroclitic or cryptic epitopes is cross-reactive with the native tumor-specific antigen. In some embodiments, the adaptive immune response elicited by the heteroclitic or cryptic epitopes is cross-reactive with neoepitopes arising from spontaneous mutations occurring in the tumor specific antigen.

[0203] There are advantages associated with using heteroclitic epitopes in clinical applications. For example, heteroclitic epitopes have the ability to break/overcome tolerance by reversing a state of T cell anergy, activating non-tolerized cross-reactive clones of T cells, or by mediating “immune deviation,” i.e., the type of CTL produced, such as Th1 or Th2. Recent studies indicate that heteroclitic epitopes are immunogenic (Zaremba, et al., Cancer Research, 57:4570 (1997); Rivoltoni, et al., Cancer Research, 59:301 (1999); Selby, et al., The Journal of Immunology 162(2):669 (1999), the entire contents of each of which are incorporated herein by reference) in that they are capable of inducing CTLs that recognize endogenously processed epitopes. This is confirmed by studies in different immunological systems (Zugel, et al., J. Immunol., 161:1705 (1998), Wang, et al., J. Exp. Med., 190:983 (1999), Men, et al., J. Immunol., 162:3566, (1999), the entire contents of each of which are incorporated herein by reference). For example, studies by Zugel et al. have shown that T cell tolerance to an immunodominant T cell epitope in adult mice can be overcome by immunization with heteroclitic cross-reactive peptide analogs of that peptide.

[0204] In some embodiments, heteroclitic epitopes or cryptic epitopes modulate cytokine production from T cells (Pfeiffer, et al., J. Exp. Med., 181:1569 (1995), Tao, et al., J. Immunol., 158:4237 (1997), Salazar, et al., Int. J. Cancer 85(6):829-38 (2000), Nicholson, et al., Int. Immunol. 12(2):205-13 (2000), the entire contents of each of which are incorporated herein by reference). The immune deviation induced by such analogs has implications in several disease states, where generation of a specific subset of Th cell responses correlate with tumor regression (Zitvogel, et al., J. Exp. Med., 183:87 (1996), Celluzzi, et al., J. Exp. Med. 183:283 (1996), the entire contents of each of which are incorporated herein by reference) or affected the clinical outcome of autoimmune or infectious disease (Romagnani, et al., Annu. Rev. Immunol., 12:227-57 (1994), the entire contents of which are incorporated herein by reference). Thus, immunization with heteroclitic epitopes offers the capacity to modulate cytokine production by induction of specific subsets of effector T cells, thereby altering the course of disease.

[0205] In some embodiments, heteroclitic epitopes offer an advantage in drug development since significantly smaller amounts of peptide are needed for treatment doses, due to their strong biological potency. This feature overcomes certain manufacturing and toxicity concerns. In this regard, it has been shown that a heteroclitic analog of a MART-1 peptide (Rivoltini, et al., Cancer Research 59:301 (1999), the entire contents of which are incorporated herein by reference), which generated antigen specific T cells in melanoma patients, was active at much lower concentrations than the native epitope. Similar results were reported by Schlom and colleagues (Zaremba, et al., Cancer Research 57:4570 (1997), the entire contents of which are incorporated herein by reference) regarding heteroclitic analog of the CEA derived CAP1 epitope.

### Nucleobase Editors

[0206] The methods of generating immunogenic peptides or epitopes from tumor associated antigens as cancer vaccines described herein, are enabled by the use of the nucleobase editors. As described herein, a nucleobase editor is a fusion protein comprising: (i) a programmable DNA binding protein domain; and (ii) a deaminase domain. It is to be understood that any programmable DNA binding domain may be used in the based editors.

[0207] In some embodiments, the programmable DNA binding protein domain comprises the DNA binding domain of a zinc finger nuclease (ZFN) or a transcription activator-like effector domain (TALE). In some embodiments, the programmable DNA binding protein domain may be programmed by a guide nucleotide sequence, and is thus referred as a “guide nucleotide sequence-programmable DNA binding-protein domain.” In some embodiments, the guide nucleotide sequence-programmable DNA binding protein is a nuclease inactive Cas9, or dCas9. A dCas9, as used herein, encompasses a Cas9 that is completely inactive in its nuclease activity, or partially inactive in its nuclease activity (e.g., a Cas9 nickase). Thus, in some embodiments, the guide nucleotide sequence-programmable DNA binding protein is a Cas9 nickase. In some embodiments, the guide nucleotide sequence-programmable DNA binding protein is a nuclease inactive Cpf1. In some embodiments, the guide nucleotide sequence-programmable DNA binding protein is a nuclease inactive Argonaute. In some embodiments, the guide nucleotide sequence-programmable DNA binding protein is a nuclease inactive CasX or CasY, e.g., as described in Burstein et al., New CRISPR-Cas systems from uncultivated microbes, Nature 542, 237-241, 2017, incorporated herein by reference.

[0208] In some embodiments, the guide nucleotide sequence-programmable DNA binding protein is a dCas9 domain. In some embodiments, the guide nucleotide sequence-programmable DNA binding protein is a Cas9 nickase. In some embodiments, the dCas9 domain comprises the amino acid sequence of SEQ ID NO: 2 or SEQ ID NO: 3. In some embodiments, the dCas9 domain comprises an amino acid sequence that is at least 60%, at least 65%, at least 70%, at least 75%, at least 80%, at least 85%, at least 90%, at least 91%, at least 92%, at least 93%, at least 94%, at least 95%, at least 96%, at least 97%, at least 98%, at least 99%, or at least 99.5% identical to any one of the Cas9 domains provided herein (e.g., SEQ ID NOs: 11-260), and comprises mutations corresponding to D10X (X is any amino acid except for D) and/or H840X (X is any amino acid except for H) in SEQ ID NO: 1. In some embodiments, the dCas9 domain comprises an amino acid sequence that is at least 60%, at least 65%, at least 70%, at least 75%, at least 80%, at least 85%, at least 90%, at least 91%, at least 92%, at least 93%, at least 94%, at least 95%, at least 96%, at least 97%, at least 98%, at least 99%, or at least 99.5% identical to any one of the Cas9 domains provided herein (e.g., SEQ ID NOs: 11-260), and comprises mutations corresponding to D10A and/or H840A in SEQ ID NO: 1. In some embodiments, the Cas9 nickase comprises an amino acid sequence that is at least 60%, at least 65%, at least 70%, at least 75%, at least 80%, at least 85%, at least 90%, at least 91%, at least 92%, at least 93%, at least 94%, at least 95%, at least 96%, at least 97%, at least 98%, at least 99%, or at least 99.5% identical to any one of the Cas9 domains provided herein (e.g., SEQ ID NOs: 11-260), and comprises mutations corresponding to D10X (X is any amino acid except for D) in SEQ ID NO: 1 and a histidine at a position correspond to position 840 in SEQ ID NO: 1. In some embodiments, the Cas9 nickase comprises an amino acid sequence that is at least 60%, at least 65%, at least 70%, at least 75%, at least 80%, at least 85%, at least 90%, at least 91%, at least 92%, at least 93%, at least 94%, at least 95%, at least 96%, at least 97%, at least 98%, at least 99%, or at least 99.5% identical to any one of the Cas9 domains provided herein (e.g., SEQ ID NOs: 11-260), and comprises mutations corresponding to D10A in SEQ ID NO: 1 and a histidine at a position correspond to position 840 in SEQ ID NO: 1. In some embodiments, variants or homologues of dCas9 or Cas9 nickase (e.g., variants of SEQ ID NO: 2 or SEQ ID NO: 3, respectively) are provided which are at least about 70% identical, at least about 80% identical, at least about 90% identical, at least about 95% identical, at least about 98% identical, at least about 99% identical, at least about 99.5% identical, or at least about 99.9% to SEQ ID NO: 2 or SEQ ID NO: 3, respectively, and comprises mutations corresponding to D10A and/or H840A in SEQ ID NO: 1. In some embodiments, variants of Cas9 (e.g., variants of SEQ ID NO: 2) are provided having amino acid sequences which are shorter, or longer than SEQ ID NO: 2, by about 5 amino acids, by about 10 amino acids, by about 15 amino acids, by about 20 amino acids, by about 25 amino acids, by about 30 amino acids, by about 40 amino acids, by about 50 amino acids, by about 75 amino acids, by about 100 amino acids, or more, provided that the dCas9 variants comprise mutations corresponding to D10A and/or H840A in SEQ ID NO: 1. In some embodiments, variants of Cas9 nickase (e.g., variants of SEQ ID NO: 3) are provided having amino acid sequences which are shorter, or longer than SEQ ID NO: 3, by about 5 amino acids, by about 10 amino acids, by about 15 amino acids, by about 20 amino acids, by about 25 amino acids, by about 30 amino acids, by about 40 amino acids, by about 50 amino acids, by about 75 amino acids, by about 100 amino acids, or more, provided that the dCas9 variants comprise mutations corresponding to D10A and comprises a histidine at a position corresponding to position 840 in SEQ ID NO: 1.

[0209] Additional suitable nuclease-inactive dCas9 domains will be apparent to those of skill in the art based on this disclosure and knowledge in the field, and are within the scope of this disclosure. Such additional exemplary suitable nuclease-inactive Cas9 domains include, but are not limited to, D10A/H840A, D10A/D839A/H840A, D10A/D839A/H840A/N863A mutant domains (See, e.g., Prashant et al., Nature Biotechnology. 2013; 31(9): 833-838, which are incorporated herein by reference), or K603R (See, e.g., Chavez et al., Nature Methods 12, 326-328, 2015, which is incorporated herein by reference.

[0210] In some embodiments, the nucleobase editors utilized in the present invention comprise a Cas9 domain with decreased electrostatic interactions between the Cas9 domain and a sugar-phosphate backbone of a DNA, as compared to a wild-type Cas9 domain. In some embodiments, a Cas9 domain comprises one or more mutations that decreases the association between the Cas9 domain and a sugar-phosphate backbone of a DNA. In some embodiments, the nucleobase editors described herein comprises a dCas9 (e.g., with D10A and H840A mutations) or a Cas9 nickase (e.g., with D10A mutation), wherein the dCas9 or the Cas9 nickase further comprises one or more of a N497X, R661X, Q695X, and/or Q926X mutation of the amino acid sequence provided in SEQ ID NO: 1, or a corresponding mutation in any of the amino acid sequences provided in SEQ ID NOs: 11-260, wherein X is any amino acid. In some embodiments, the nucleobase editors described herein comprises a dCas9 (e.g., with D10A and H840A mutations) or a Cas9 nickase (e.g., with D10A mutation), wherein the dCas9 or the Cas9 nickase further comprises one or more of a N497A, R661A, Q695A, and/or Q926A mutation of the amino acid sequence provided in SEQ ID NO: 1, or a corresponding mutation in any of the amino acid sequences provided in SEQ ID NOs: 11-260. In some embodiments, the dCas9 domain (e.g., of any of the nucleobase editors provided herein) comprises the amino acid sequence as set forth in any one of SEQ ID NOs: 2-9. In some embodiments, the nucleobase editor comprises the amino acid sequence as set forth in any one of SEQ ID NOs: 293-302 and 321.

Cas9 variant with decreased electrostatic
interactions between the Cas9 and DNA backbone
(SEQ ID NO: 9, mutations relative to SEQ
ID NO: 1 are bolded and underlined)
DKKYSIGLAIGTNSVGWAVITDEYKVPSKKFKVLGNTDRHSIKKNLIGALL
FDSGETAEATRLKRTARRRYTRRKNRICYLQEIFSNEMAKVDDSFFHRLEE
SFLVEEDKKHERHPIFGNIVDEVAYHEKYPTIYHLRKKLVDSTDKADLRLI
YLALAHMIKFRGHFLIEGDLNPDNSDVDKLFIQLVQTYNQLFEENPINASG
VDAKAILSARLSKSRRLENLIAQLPGEKKNGLFGNLIALSLGLTPNFKSNF
DLAEDAKLQLSKDTYDDDLDNLLAQIGDQYADLFLAAKNLSDAILLSDILR
VNTEITKAPLSASMIKRYDEHHQDLTLLKALVRQQLPEKYKEIFFDQSKNG
YAGYIDGGASQEEFYKFIKPILEKMDGTEELLVKLNREDLLRKQRTFDNGS
IPHQIHLGELHAILRRQEDFYPFLKDNREKIEKILTFRIPYYVGPLARGNS
RFAWMTRKSEETITPWNFEEVVDKGASAQSFIERMTAFDKNLPNEKVLPKH
SLLYEYFTVYNELTKVKYVTEGMRKPAFLSGEQKKAIVDLLFKTNRKVTVK
QLKEDYFKKIECFDSVEISGVEDRFNASLGTYHDLLKIIKDKDFLDNEENE
DILEDIVLTLTLFEDREMIEERLKTYAHLFDDKVMKQLKRRRYTGWGALSR
KLINGIRDKQSGKTILDFLKSDGFANRNFMALIHDDSLTFKEDIQKAQVSG
QGDSLHEHIANLAGSPAIKKGILQTVKVVDELVKVMGRHKPENIVIEMARE
NQTTQKGQKNSRERMKRIEEGIKELGSQILKEHPVENTQLQNEKLYLYYLQ
NGRDMYVDQELDINRLSDYDVDHIVPQSFLKDDSIDNKVLTRSDKNRGKSD
NVPSEEVVKKMKNYWRQLLNAKLITQRKFDNLTKAERGGLSELDKAGFIKR
QLVETRAITKHVAQILDSRMNTKYDENDKLIREVKVITLKSKLVSDFRKDF
QFYKVREINNYHHAHDAYLNAVVGTALIKKYPKLESEFVYGDYKVYDVRKM
IAKSEQEIGKATAKYFFYSNIMNFFKTEITLANGEIRKRPLIETNGETGEI
VWDKGRDFATVRKVLSMPQVNIVKKTEVQTGGFSKESILPKRNSDKLIARK
KDWDPKKYGGFDSPTVAYSVLVVAKVEKGKSKKLKSVKELLGITIMERSSF
EKNPIDFLEAKGYKEVKKDLIIKLPKYSLFELENGRKRMLASAGELQKGNE
LALPSKYVNFLYLASHYEKLKGSPEDNEQKQLFVEQHKHYLDEIIEQISEF
SKRVILADANLDKVLSAYNKHRDKPIREQAENIIHLFTLTNLGAPAAFKYF
DTTIDRKRYTSTKEVLDATLIHQSITGLYETRIDLSQLGGD
High fidelity nucleobase editor
(SEQ ID NO: 321)
MSSETGPVAVDPTLRRRIEPHEFEVFFDPRELRKETCLLYEINWGGRHSIW
RHTSQNTNKHVEVNFIEKFTTERYFCPNTRCSITWFLSWSPCGECSRAITE
FLSRYPHVTLFIYIARLYHHADPRNRQGLRDLISSGVTIQIMTEQESGYCW
RNFVNYSPSNEAHWPRYPHLWVRLYVLELYCIILGLPPCLNILRRKQPQLT
FFTIALQSCHYQRLPPHILWATGLKSGSETPGTSESATPESDKKYSIGLAI
GTNSVGWAVITDEYKVPSKKFKVLGNTDRHSIKKNLIGALLFDSGETAEAT
RLKRTARRRYTRRKNRICYLQEIFSNEMAKVDDSFFHRLEESFLVEEDKKH
ERHPIFGNIVDEVAYHEKYPTIYHLRKKLVDSTDKADLRLIYLALAHMIKF
RGHFLIEGDLNPDNSDVDKLFIQLVQTYNQLFEENPINASGVDAKAILSAR
LSKSRRLENLIAQLPGEKKNGLFGNLIALSLGLTPNFKSNFDLAEDAKLQL
SKDTYDDDLDNLLAQIGDQYADLFLAAKNLSDAILLSDILRVNTEITKAPL
SASMIKRYDEHHQDLTLLKALVRQQLPEKYKEIFFDQSKNGYAGYIDGGAS
QEEFYKFIKPILEKMDGTEELLVKLNREDLLRKQRTFDNGSIPHQIHLGEL
HAILRRQEDFYPFLKDNREKIEKILTFRIPYYVGPLARGNSRFAWMTRKSE
ETITPWNFEEVVDKGASAQSFIERMTAFDKNLPNEKVLPKHSLLYEYFTVY
NELTKVKYVTEGMRKPAFLSGEQKKAIVDLLFKTNRKVTVKQLKEDYFKKI
ECFDSVEISGVEDRFNASLGTYHDLLKIIKDKDFLDNEENEDILEDIVLTL
TLFEDREMIEERLKTYAHLFDDKVMKQLKRRRYTGWGALSRKLINGIRDKQ
SGKTILDFLKSDGFANRNFMALIHDDSLTFKEDIQKAQVSGQGDSLHEHIA
NLAGSPAIKKGILQTVKVVDELVKVMGRHKPENIVIEMARENQTTQKGQKN
SRERMKRIEEGIKELGSQILKEHPVENTQLQNEKLYLYYLQNGRDMYVDQE
LDINRLSDYDVDHIVPQSFLKDDSIDNKVLTRSDKNRGKSDNVPSEEVVKK
MKNYWRQLLNAKLITQRKFDNLTKAERGGLSELDKAGFIKRQLVETRAITK
HVAQILDSRMNTKYDENDKLIREVKVITLKSKLVSDFRKDFQFYKVREINN
YHHAHDAYLNAVVGTALIKKYPKLESEFVYGDYKVYDVRKMIAKSEQEIGK
ATAKYFFYSNIMNFFKTEITLANGEIRKRPLIETNGETGEIVWDKGRDFAT
VRKVLSMPQVNIVKKTEVQTGGFSKESILPKRNSDKLIARKKDWDPKKYGG
FDSPTVAYSVLVVAKVEKGKSKKLKSVKELLGITIMERSSFEKNPIDFLEA
KGYKEVKKDLIIKLPKYSLFELENGRKRMLASAGELQKGNELALPSKYVNF
LYLASHYEKLKGSPEDNEQKQLFVEQHKHYLDEIIEQISEFSKRVILADAN
LDKVLSAYNKHRDKPIREQAENIIHLFTLTNLGAPAAFKYFDTTIDRKRYT
STKEVLDATLIHQSITGLYETRIDLSQLGGD

[0211] In some embodiments, the guide nucleotide sequence-programmable DNA binding protein is a single effector of a microbial CRISPR-Cas system. Single effectors of microbial CRISPR-Cas systems include, without limitation, Cas9, Cpf1, C2c1, C2c2, and C2c3. Typically, microbial CRISPR-Cas systems are divided into Class 1 and Class 2 systems. Class 1 systems have multisubunit effector complexes, while Class 2 systems have a single protein effector. Cas9 and Cpf1 are Class 2 effectors. In addition to Cas9 and Cpf1, three distinct Class 2 CRISPR-Cas systems (C2c1, C2c2, and C2c3) have been described by Shmakov et al., “Discovery and Functional Characterization of Diverse Class 2 CRISPR Cas Systems”, Mol. Cell, 2015 Nov. 5; 60(3): 385-397, the entire contents of which are herein incorporated by reference. Effectors of two of the systems, C2c1 and C2c3, contain RuvC-like endonuclease domains related to Cpf1. A third system, C2c2 contains an effector with two predicted HEPN RNase domains. Production of mature CRISPR RNA is tracrRNA-independent, unlike production of CRISPR RNA by C2c1. C2c1 depends on both CRISPR RNA and tracrRNA for DNA cleavage. Bacterial C2c2 has been shown to possess a unique RNase activity for CRISPR RNA maturation distinct from its RNA-activated single-stranded RNA degradation activity. These RNase functions are different from each other and from the CRISPR RNA-processing behavior of Cpf1. See, e.g., East-Seletsky, et al., “Two distinct RNase activities of CRISPR-C2c2 enable guide-RNA processing and RNA detection”, Nature, 2016 Oct. 13; 538(7624):270-273, the entire contents of which are hereby incorporated by reference. In vitro biochemical analysis of C2c2 in Leptotrichia shahii has shown that C2c2 is guided by a single CRISPR RNA and can be programmed to cleave ssRNA targets carrying complementary protospacers. Catalytic residues in the two conserved HEPN domains mediate cleavage. Mutations in the catalytic residues generate catalytically inactive RNA-binding proteins. See e.g., Abudayyeh et al., “C2c2 is a single-component programmable RNA-guided RNA-targeting CRISPR effector,” Science, 2016 Aug. 5; 353(6299), the entire contents of which are hereby incorporated by reference.

[0212] The crystal structure of Alicyclobaccillus acidoterrastris C2c1 (AacC2c1) has been reported in complex with a chimeric single-molecule guide RNA (sgRNA). See, e.g., Liu et al., “C2c1-sgRNA Complex Structure Reveals RNA-Guided DNA Cleavage Mechanism”, Mol. Cell, 2017 Jan. 19; 65(2):310-322, incorporated herein by reference. The crystal structure has also been reported for Alicyclobacillus acidoterrestris C2c1 bound to target DNAs as ternary complexes. See, e.g., Yang et al., “PAM-dependent Target DNA Recognition and Cleavage by C2C1 CRISPR-Cas endonuclease”, Cell, 2016 Dec. 15; 167(7):1814-1828, the entire contents of which are hereby incorporated by reference. Catalytically competent conformations of AacC2c1, both with target and non-target DNA strands, have been captured independently positioned within a single RuvC catalytic pocket, with C2c1-mediated cleavage resulting in a staggered seven-nucleotide break of target DNA. Structural comparisons between C2c1 ternary complexes and previously identified Cas9 and Cpf1 counterparts demonstrate the diversity of mechanisms used by CRISPR-Cas9 systems.

[0213] In some embodiments, the nucleobase editors described herein comprise a C2c1, a C2c2, or a C2c3 protein. In some embodiments, the guide nucleotide sequence-programmable DNA binding protein is a C2c1 protein. In some embodiments, the guide nucleotide sequence-programmable DNA binding protein is a C2c2 protein. In some embodiments, the guide nucleotide sequence-programmable DNA binding protein is a C2c3 protein. In some embodiments, the guide nucleotide sequence-programmable DNA binding protein comprises an amino acid sequence that is at least 85%, at least 90%, at least 91%, at least 92%, at least 93%, at least 94%, at least 95%, at least 96%, at least 97%, at least 98%, at least 99%, or at least 99.5% identical to a naturally-occurring C2c1, C2c2, or C2c3 protein. In some embodiments, the guide nucleotide sequence-programmable DNA binding protein is a naturally-occurring C2c1, C2c2, or C2c3 protein. In some embodiments, the guide nucleotide sequence-programmable DNA binding protein comprises an amino acid sequence that is at least 85%, at least 90%, at least 91%, at least 92%, at least 93%, at least 94%, at least 95%, at least 96%, at least 97%, at least 98%, at least 99%, or at least 99.5% identical to any one of SEQ ID NOs: 1057-1059. In some embodiments, the guide nucleotide sequence-programmable DNA binding protein comprises an amino acid sequence of any one SEQ ID NOs: 1057-1059. It should be appreciated that C2c1, C2c2, or C2c3 from other bacterial species may also be used in accordance with the present disclosure.

C2c1 (uniprot.org/uniprot/T0D7A2#)
sp|T0D7A2|C2C1_ALIAG CRISPR-associated
endonuclease C2c1 OS = Alicyclobacillus
acidoterrestris (strain ATCC 49025/DSM 3922/
CIP 106132/NCIMB 13137/GD3B) GN = c2c1
PE = 1 SV = 1
(SEQ ID NO: 1057)
MAVKSIKVKLRLDDMPEIRAGLWKLHKEVNAGVRYYTEWLSLLRQENLY
RRSPNGDGEQECDKTAEECKAELLERLRARQVENGHRGPAGSDDELLQL
ARQLYELLVPQAIGAKGDAQQIARKFLSPLADKDAVGGLGIAKAGNKPR
WVRMREAGEPGWEEEKEKAETRKSADRTADVLRALADFGLKPLMRVYTD
SEMSSVEWKPLRKGQAVRTWDRDMFQQAIERMMSWESWNQRVGQEYAKL
VEQKNRFEQKNFVGQEHLVHLVNQLQQDMKEASPGLESKEQTAHYVTGR
ALRGSDKVFEKWGKLAPDAPFDLYDAEIKNVQRRNTRRFGSHDLFAKLA
EPEYQALWREDASFLTRYAVYNSILRKLNHAKMFATFTLPDATAHPIWT
RFDKLGGNLHQYTFLFNEFGERRHAIRFHKLLKVENGVAREVDDVTVPI
SMSEQLDNLLPRDPNEPIALYFRDYGAEQHFTGEFGGAKIQCRRDQLAH
MHRRRGARDVYLNVSVRVQSQSEARGERRPPYAAVFRLVGDNHRAFVHF
DKLSDYLAEHPDDGKLGSEGLLSGLRVMSVDLGLRTSASISVFRVARKD
ELKPNSKGRVPFFFPIKGNDNLVAVHERSQLLKLPGETESKDLRAIREE
RQRTLRQLRTQLAYLRLLVRCGSEDVGRRERSWAKLIEQPVDAANHMTP
DWREAFENELQKLKSLHGICSDKEWMDAVYESVRRVWRHMGKQVRDWRK
DVRSGERPKIRGYAKDVVGGNSIEQIEYLERQYKFLKSWSFFGKVSGQV
IRAEKGSRFAITLREHIDHAKEDRLKKLADRIIMEALGYVYALDERGKG
KWVAKYPPCQLILLEELSEYQFNNDRPPSENNQLMQWSHRGVFQELINQ
AQVHDLLVGTMYAAFSSRFDARTGAPGIRCRRVPARCTQEHNPEPFPWW
LNKFVVEHTLDACPLRADDLIPTGEGEIFVSPFSAEEGDFHQIHADLNA
AQNLQQRLWSDFDISQIRLRCDWGEVDGELVLIPRLTGKRTADSYSNKV
FYTNTGVTYYERERGKKRRKVFAQEKLSEEEAELLVEADEAREKSVVLM
RDPSGIINRGNWTRQKEFWSMVNQRIEGYLVKQIRSRVPLQDSACENTG
DI
C2c2 (uniprot.org/uniprot/P0DOC6)
>sp|P0DOC6|C2C2_LEPSD CRISPR-associated
endoribonuclease C2c2 OS = Leptotrichia shahii
(strain DSM 19757/CCUG 47503/CIP 107916/
JCM 16776/LB37) GN = c2c2 PE = 1 SV = 1
(SEQ ID NO: 1058)
MGNLFGHKRWYEVRDKKDFKIKRKVKVKRNYDGNKYILNINENNNKEKI
DNNKFIRKYINYKKNDNILKEFTRKFHAGNILFKLKGKEGIIRIENNDD
FLETEEVVLYIEAYGKSEKLKALGITKKKIIDEAIRQGITKDDKKIEIK
RQENEEEIEIDIRDEYTNKTLNDCSIILRIIENDELETKKSIYEIFKNI
NMSLYKIIEKIIENETEKVFENRYYEEHLREKLLKDDKIDVILTNFMEI
REKIKSNLEILGFVKFYLNVGGDKKKSKNKKMLVEKILNINVDLTVEDI
ADFVIKELEFWNITKRIEKVKKVNNEFLEKRRNRTYIKSYVLLDKHEKF
KIERENKKDKIVKFFVENIKNNSIKEKIEKILAEFKIDELIKKLEKELK
KGNCDTEIFGIFKKHYKVNFDSKKFSKKSDEEKELYKIIYRYLKGRIEK
ILVNEQKVRLKKMEKIEIEKILNESILSEKILKRVKQYTLEHIMYLGKL
RHNDIDMTTVNTDDFSRLHAKEELDLELITFFASTNMELNKIFSRENIN
NDENIDFFGGDREKNYVLDKKILNSKIKIIRDLDFIDNKNNITNNFIRK
FTKIGTNERNRILHAISKERDLQGTQDDYNKVINIIQNLKISDEEVSKA
LNLDVVFKDKKNIITKINDIKISEENNNDIKYLPSFSKVLPEILNLYRN
NPKNEPFDTIETEKIVLNALIYVNKELYKKLILEDDLEENESKNIFLQE
LKKTLGNIDEIDENIIENYYKNAQISASKGNNKAIKKYQKKVIECYIGY
LRKNYEELFDFSDFKMNIQEIKKQIKDINDNKTYERITVKTSDKTIVIN
DDFEYIISIFALLNSNAVINKIRNRFFATSVWLNTSEYQNIIDILDEIM
QLNTLRNECITENWNLNLEEFIQKMKEIEKDFDDFKIQTKKEIFNNYYE
DIKNNILTEFKDDINGCDVLEKKLEKIVIFDDETKFEIDKKSNILQDEQ
RKLSNINKKDLKKKVDQYIKDKDQEIKSKILCRIIFNSDFLKKYKKEID
NLIEDMESENENKFQEIYYPKERKNELYIYKKNLFLNIGNPNFDKIYGL
ISNDIKMADAKFLFNIDGKNIRKNKISEIDAILKNLNDKLNGYSKEYKE
KYIKKLKENDDFFAKNIQNKNYKSFEKDYNRVSEYKKIRDLVEFNYLNK
IESYLIDINWKLAIQMARFERDMHYIVNGLRELGIIKLSGYNTGISRAY
PKRNGSDGFYTTTAYYKFFDEESYKKFEKICYGFGIDLSENSEINKPEN
ESIRNYISHFYIVRNPFADYSIAEQIDRVSNLLSYSTRYNNSTYASVFE
VFKKDVNLDYDELKKKFKLIGNNDILERLMKPKKVSVLELESYNSDYIK
NLIIELLTKIENTNDTL
C2c3, translated from >CEPX01008730.1 marine
metagenome genome assembly TARA_037_MES_0.1-0.22,
contig TARA_037_MES_0.1-0.22_scaffold22115_1,
whole genome shotgun sequence.
(SEQ ID NO: 1059)
MRSNYHGGRNARQWRKQISGLARRTKETVFTYKFPLETDAAEIDFDKAV
QTYGIAEGVGHGSLIGLVCAFHLSGFRLFSKAGEAMAFRNRSRYPTDAF
AEKLSAIMGIQLPTLSPEGLDLIFQSPPRSRDGIAPVWSENEVRNRLYT
NWTGRGPANKPDEHLLEIAGEIAKQVFPKFGGWDDLASDPDKALAAADK
YFQSQGDFPSIASLPAAIMLSPANSTVDFEGDYIAIDPAAETLLHQAVS
RCAARLGRERPDLDQNKGPFVSSLQDALVSSQNNGLSWLFGVGFQHWKE
KSPKELIDEYKVPADQHGAVTQVKSFVDAIPLNPLFDTTHYGEFRASVA
GKVRSWVANYWKRLLDLKSLLATTEFTLPESISDPKAVSLFSGLLVDPQ
GLKKVADSLPARLVSAEEAIDRLMGVGIPTAADIAQVERVADEIGAFIG
QVQQFNNQVKQKLENLQDADDEEFLKGLKIELPSGDKEPPAINRISGGA
PDAAAEISELEEKLQRLLDARSEHFQTISEWAEENAVTLDPIAAMVELE
RLRLAERGATGDPEEYALRLLLQRIGRLANRVSPVSAGSIRELLKPVFM
EEREFNLFFHNRLGSLYRSPYSTSRHQPFSIDVGKAKAIDWIAGLDQIS
SDIEKALSGAGEALGDQLRDWINLAGFAISQRLRGLPDTVPNALAQVRC
PDDVRIPPLLAMLLEEDDIARDVCLKAFNLYVSAINGCLFGALREGFIV
RTRFQRIGTDQIHYVPKDKAWEYPDRLNTAKGPINAAVSSDWIEKDGAV
IKPVETVRNLSSTGFAGAGVSEYLVQAPHDWYTPLDLRDVAHLVTGLPV
EKNITKLKRLTNRTAFRMVGASSFKTHLDSVLLSDKIKLGDFTIIIDQH
YRQSVTYGGKVKISYEPERLQVEAAVPVVDTRDRTVPEPDTLFDHIVAI
DLGERSVGFAVFDIKSCLRTGEVKPIHDNNGNPVVGTVAVPSIRRLMKA
VRSHRRRRQPNQKVNQTYSTALQNYRENVIGDVCNRIDTLMERYNAFPV
LEFQIKNFQAGAKQLEIVYGS

[0214] Cas9 recognizes a short motif (PAM motif) in the CRISPR repeat sequences in the target DNA sequence. A “PAM motif,” or “protospacer adjacent motif,” as used herein, refers a DNA sequence immediately following the DNA sequence targeted by the Cas9 nuclease in the CRISPR bacterial adaptive immune system. PAM is a component of the invading virus or plasmid, but is not a component of the bacterial CRISPR locus. Naturally, Cas9 will not successfully bind to or cleave the target DNA sequence if it is not followed by the PAM sequence. PAM is an essential targeting component (not found in the bacterial genome) which distinguishes bacterial self from non-self DNA, thereby preventing the CRISPR locus from being targeted and destroyed by nuclease.

[0215] Wild-type Streptococcus pyogenes Cas9 recognizes a canonical PAM sequence (5′-NGG-3′). Other Cas9 nucleases (e.g., Cas9 from Streptococcus thermophiles, Staphylococcus aureus, Neisseria meningitidis, or Treponema denticolaor) and Cas9 variants thereof have been described in the art to have different, or more relaxed PAM requirements. For example, in Kleinstiver et al., Nature 523, 481-485, 2015; Klenstiver et al., Nature 529, 490-495, 2016; Ran et al., Nature, Apr. 9; 520(7546): 186-191, 2015; Kleinstiver et al., Nat Biotechnol, 33(12):1293-1298, 2015; Hou et al., Proc Natl Acad Sci USA, 110(39):15644-9, 2014; Prykhozhij et al., PLoS One, 10(3): e0119372, 2015; Zetsche et al., Cell 163, 759-771, 2015; Gao et al., Nature Biotechnology, doi:10.1038/nbt.3547, 2016; Want et al., Nature 461, 754-761, 2009; Chavez et al., doi: dx.doi.org/10.1101/058974; Fagerlund et al., Genome Biol. 2015; 16: 25, 2015; Zetsche et al., Cell, 163, 759-771, 2015; and Swarts et al., Nat Struct Mol Biol, 21(9):743-53, 2014, each of which is incorporated herein by reference.

[0216] Thus, the guide nucleotide sequence-programmable DNA-binding protein of the present disclosure may recognize a variety of PAM sequences including, without limitation: NGG, NGAN, NGNG, NGAG, NGCG, NNGRRT, NGRRN, NNNRRT, NNNGATT, NNAGAAW, NAAAC, TTN, TTTN, and YTN, wherein Y is a pyrimidine, and N is any nucleobase. In some embodiments, the PAM is located 5′ of the target base. In some embodiments, the PAM is located 3′ of the target base.

[0217] One example of an RNA-programmable DNA-binding protein that has different PAM specificity is Clustered Regularly Interspaced Short Palindromic Repeats from Prevotella and Francisella 1 (Cpf1). Similar to Cas9, Cpf1 is also a class 2 CRISPR effector. It has been shown that Cpf1 mediates robust DNA interference with features distinct from Cas9. Cpf1 is a single RNA-guided endonuclease lacking tracrRNA, and it utilizes a T-rich protospacer-adjacent motif (TTN, TTTN, or YTN). Moreover, Cpf1 cleaves DNA via a staggered DNA double-stranded break. Out of 16 Cpf1-family proteins, two enzymes from Acidaminococcus and Lachnospiraceae are shown to have efficient genome-editing activity in human cells.

[0218] Also useful in the present disclosure are nuclease-inactive Cpf1 (dCpf1) variants that may be used as a guide nucleotide sequence-programmable DNA-binding protein domain. The Cpf1 protein has a RuvC-like endonuclease domain that is similar to the RuvC domain of Cas9 but does not have a HNH endonuclease domain, and the N-terminal of Cpf1 does not have the alfa-helical recognition lobe of Cas9. It was shown in Zetsche et al., Cell, 163, 759-771, 2015 (which is incorporated herein by reference) that, the RuvC-like domain of Cpf1 is responsible for cleaving both DNA strands and inactivation of the RuvC-like domain inactivates Cpf1 nuclease activity. For example, mutations corresponding to D917A, E1006A, or D1255A in Francisella novicida Cpf1 (SEQ ID NO: 10) inactivates Cpf1 nuclease activity. In some embodiments, the dCpf1 of the present disclosure comprises mutations corresponding to D917A, E1006A, D1255A, D917A/E1006A, D917A/D1255A, E1006A/D1255A, or D917A/E1006A/D1255A in SEQ ID NO: 10. It is to be understood that any mutations, e.g., substitution mutations, deletions, or insertions that inactivates the RuvC domain of Cpf1 may be used in accordance with the present disclosure.

[0219] Thus, in some embodiments, the guide nucleotide sequence-programmable DNA binding protein is a nuclease inactive Cpf1 (dCpf1). In some embodiments, the dCpf1 comprises the amino acid sequence of any one SEQ ID NOs: 261-267. In some embodiments, the dCpf1 comprises an amino acid sequence that is at least 85%, at least 90%, at least 91%, at least 92%, at least 93%, at least 94%, at least 95%, at least 96%, at least 97%, at least 98%, at least 99%, or at ease 99.5% identical to SEQ ID NO: 10, and comprises mutations corresponding to D917A, E1006A, D1255A, D917A/E1006A, D917A/D1255A, E1006A/D1255A, or D917A/E1006A/D1255A in SEQ ID NO: 10. Cpf1 from other bacterial species may also be used in accordance with the present disclosure.

Wild type Francisella novicida Cpf1 (D917, E1006,
and D1255 are bolded and underlined)
(SEQ ID NO: 10)
MSIYQEFVNKYSLSKTLRFELIPQGKTLENIKARGLILDDEKRAKDYKK
AKQIIDKYHQFFIEEILSSVCISEDLLQNYSDVYFKLKKSDDDNLQKDF
KSAKDTIKKQISEYIKDSEKFKNLFNQNLIDAKKGQESDLILWLKQSKD
NGIELFKANSDITDIDEALEIIKSFKGWTTYFKGFHENRKNVYSSNDIP
TSIIYRIVDDNLPKFLENKAKYESLKDKAPEAINYEQIKKDLAEELTFD
IDYKTSEVNQRVFSLDEVFEIANFNNYLNQSGITKFNTIIGGKFVNGEN
TKRKGINEYINLYSQQINDKTLKKYKMSVLFKQILSDTESKSFVIDKLE
DDSDVVTTMQSFYEQIAAFKTVEEKSIKETLSLLFDDLKAQKLDLSKIY
FKNDKSLTDLSQQVFDDYSVIGTAVLEYITQQIAPKNLDNPSKKEQELI
AKKTEKAKYLSLETIKLALEEFNKHRDIDKQCRFEEILANFAAIPMIFD
EIAQNKDNLAQISIKYQNQGKKDLLQASAEDDVKAIKDLLDQTNNLLHK
LKIFHISQSEDKANILDKDEHFYLVFEECYFELANIVPLYNKIRNYITQ
KPYSDEKFKLNFENSTLANGWDKNKEPDNTAILFIKDDKYYLGVMNKKN
NKIFDDKAIKENKGEGYKKIVYKLLPGANKMLPKVFFSAKSIKFYNPSE
DILRIRNHSTHTKNGSPQKGYEKFEFNIEDCRKFIDFYKQSISKHPEWK
DFGFRFSDTQRYNSIDEFYREVENQGYKLTFENISESYIDSVVNQGKLY
LFQIYNKDFSAYSKGRPNLHTLYWKALFDERNLQDVVYKLNGEAELFYR
KQSIPKKITHPAKEAIANKNKDNPKKESVFEYDLIKDKRFTEDKFFFHC
PITINFKSSGANKFNDEINLLLKEKANDVHILSIDRGERHLAYYTLVDG
KGNIIKQDTFNIIGNDRMKTNYHDKLAAIEKDRDSARKDWKKINNIKEM
KEGYLSQVVHEIAKLVIEYNAIVVFEDLNFGFKRGRFKVEKQVYQKLEK
MLIEKLNYLVFKDNEFDKTGGVLRAYQLTAPFETFKKMGKQTGIIYYVP
AGFTSKICPVTGFVNQLYPKYESVSKSQEFFSKFDKICYNLDKGYFEFS
FDYKNFGDKAAKGKWTIASFGSRLINFRNSDKNHNWDTREVYPTKELEK
LLKDYSIEYGHGECIKAAICGESDKKFFAKLTSVLNTILQMRNSKTGTE
LDYLISPVADVNGNFFDSRQAPKNMPQDADANGAYHIGLKGLMLLGRIK
NNQEGKKLNLVIKNEEYFEFVQNRNN
Francisella novicida Cpf1 D917A (A917, E1006, and
D1255 are bolded and underlined)
(SEQ ID NO: 261)
MSIYQEFVNKYSLSKTLRFELIPQGKTLENIKARGLILDDEKRAKDYKK
AKQIIDKYHQFFIEEILSSVCISEDLLQNYSDVYFKLKKSDDDNLQKDF
KSAKDTIKKQISEYIKDSEKFKNLFNQNLIDAKKGQESDLILWLKQSKD
NGIELFKANSDITDIDEALEIIKSFKGWTTYFKGFHENRKNVYSSNDIP
TSIIYRIVDDNLPKFLENKAKYESLKDKAPEAINYEQIKKDLAEELTFD
IDYKTSEVNQRVFSLDEVFEIANFNNYLNQSGITKFNTIIGGKFVNGEN
TKRKGINEYINLYSQQINDKTLKKYKMSVLFKQILSDTESKSFVIDKLE
DDSDVVTTMQSFYEQIAAFKTVEEKSIKETLSLLFDDLKAQKLDLSKIY
FKNDKSLTDLSQQVFDDYSVIGTAVLEYITQQIAPKNLDNPSKKEQELI
AKKTEKAKYLSLETIKLALEEFNKHRDIDKQCRFEEILANFAAIPMIFD
EIAQNKDNLAQISIKYQNQGKKDLLQASAEDDVKAIKDLLDQTNNLLHK
LKIFHISQSEDKANILDKDEHFYLVFEECYFELANIVPLYNKIRNYITQ
KPYSDEKFKLNFENSTLANGWDKNKEPDNTAILFIKDDKYYLGVMNKKN
NKIFDDKAIKENKGEGYKKIVYKLLPGANKMLPKVFFSAKSIKFYNPSE
DILRIRNHSTHTKNGSPQKGYEKFEFNIEDCRKFIDFYKQSISKHPEWK
DFGFRFSDTQRYNSIDEFYREVENQGYKLTFENISESYIDSVVNQGKLY
LFQIYNKDFSAYSKGRPNLHTLYWKALFDERNLQDVVYKLNGEAELFYR
KQSIPKKITHPAKEAIANKNKDNPKKESVFEYDLIKDKRFTEDKFFFHC
PITINFKSSGANKFNDEINLLLKEKANDVHILSIARGERHLAYYTLVDG
KGNIIKQDTFNIIGNDRMKTNYHDKLAAIEKDRDSARKDWKKINNIKEM
KEGYLSQVVHEIAKLVIEYNAIVVFEDLNFGFKRGRFKVEKQVYQKLEK
MLIEKLNYLVFKDNEFDKTGGVLRAYQLTAPFETFKKMGKQTGIIYYVP
AGFTSKICPVTGFVNQLYPKYESVSKSQEFFSKFDKICYNLDKGYFEFS
FDYKNFGDKAAKGKWTIASFGSRLINFRNSDKNHNWDTREVYPTKELEK
LLKDYSIEYGHGECIKAAICGESDKKFFAKLTSVLNTILQMRNSKTGTE
LDYLISPVADVNGNFFDSRQAPKNMPQDADANGAYHIGLKGLMLLGRIK
NNQEGKKLNLVIKNEEYFEFVQNRNN
Francisella novicida Cpf1 E1006A (D917, A1006,
and D1255 are bolded and underlined)
(SEQ ID NO: 262)
MSIYQEFVNKYSLSKTLRFELIPQGKTLENIKARGLILDDEKRAKDYKK
AKQIIDKYHQFFIEEILSSVCISEDLLQNYSDVYFKLKKSDDDNLQKDF
KSAKDTIKKQISEYIKDSEKFKNLFNQNLIDAKKGQESDLILWLKQSKD
NGIELFKANSDITDIDEALEIIKSFKGWTTYFKGFHENRKNVYSSNDIP
TSIIYRIVDDNLPKFLENKAKYESLKDKAPEAINYEQIKKDLAEELTFD
IDYKTSEVNQRVFSLDEVFEIANFNNYLNQSGITKFNTIIGGKFVNGEN
TKRKGINEYINLYSQQINDKTLKKYKMSVLFKQILSDTESKSFVIDKLE
DDSDVVTTMQSFYEQIAAFKTVEEKSIKETLSLLFDDLKAQKLDLSKIY
FKNDKSLTDLSQQVFDDYSVIGTAVLEYITQQIAPKNLDNPSKKEQELI
AKKTEKAKYLSLETIKLALEEFNKHRDIDKQCRFEEILANFAAIPMIFD
EIAQNKDNLAQISIKYQNQGKKDLLQASAEDDVKAIKDLLDQTNNLLHK
LKIFHISQSEDKANILDKDEHFYLVFEECYFELANIVPLYNKIRNYITQ
KPYSDEKFKLNFENSTLANGWDKNKEPDNTAILFIKDDKYYLGVMNKKN
NKIFDDKAIKENKGEGYKKIVYKLLPGANKMLPKVFFSAKSIKFYNPSE
DILRIRNHSTHTKNGSPQKGYEKFEFNIEDCRKFIDFYKQSISKHPEWK
DFGFRFSDTQRYNSIDEFYREVENQGYKLTFENISESYIDSVVNQGKLY
LFQIYNKDFSAYSKGRPNLHTLYWKALFDERNLQDVVYKLNGEAELFYR
KQSIPKKITHPAKEAIANKNKDNPKKESVFEYDLIKDKRFTEDKFFFHC
PITINFKSSGANKFNDEINLLLKEKANDVHILSIDRGERHLAYYTLVDG
KGNIIKQDTFNIIGNDRMKTNYHDKLAAIEKDRDSARKDWKKINNIKEM
KEGYLSQVVHEIAKLVIEYNAIVVFADLNFGFKRGRFKVEKQVYQKLEK
MLIEKLNYLVFKDNEFDKTGGVLRAYQLTAPFETFKKMGKQTGIIYYVP
AGFTSKICPVTGFVNQLYPKYESVSKSQEFFSKFDKICYNLDKGYFEFS
FDYKNFGDKAAKGKWTIASFGSRLINFRNSDKNHNWDTREVYPTKELEK
LLKDYSIEYGHGECIKAAICGESDKKFFAKLTSVLNTILQMRNSKTGTE
LDYLISPVADVNGNFFDSRQAPKNMPQDADANGAYHIGLKGLMLLGRIK
NNQEGKKLNLVIKNEEYFEFVQNRNN
Francisella novicida Cpf1 D1255A (D917, E1006,
and A1255 are bolded and underlined)
(SEQ ID NO: 263)
MSIYQEFVNKYSLSKTLRFELIPQGKTLENIKARGLILDDEKRAKDYKK
AKQIIDKYHQFFIEEILSSVCISEDLLQNYSDVYFKLKKSDDDNLQKDF
KSAKDTIKKQISEYIKDSEKFKNLFNQNLIDAKKGQESDLILWLKQSKD
NGIELFKANSDITDIDEALEIIKSFKGWTTYFKGFHENRKNVYSSNDIP
TSIIYRIVDDNLPKFLENKAKYESLKDKAPEAINYEQIKKDLAEELTFD
IDYKTSEVNQRVFSLDEVFEIANFNNYLNQSGITKFNTIIGGKFVNGEN
TKRKGINEYINLYSQQINDKTLKKYKMSVLFKQILSDTESKSFVIDKLE
DDSDVVTTMQSFYEQIAAFKTVEEKSIKETLSLLFDDLKAQKLDLSKIY
FKNDKSLTDLSQQVFDDYSVIGTAVLEYITQQIAPKNLDNPSKKEQELI
AKKTEKAKYLSLETIKLALEEFNKHRDIDKQCRFEEILANFAAIPMIFD
EIAQNKDNLAQISIKYQNQGKKDLLQASAEDDVKAIKDLLDQTNNLLHK
LKIFHISQSEDKANILDKDEHFYLVFEECYFELANIVPLYNKIRNYITQ
KPYSDEKFKLNFENSTLANGWDKNKEPDNTAILFIKDDKYYLGVMNKKN
NKIFDDKAIKENKGEGYKKIVYKLLPGANKMLPKVFFSAKSIKFYNPSE
DILRIRNHSTHTKNGSPQKGYEKFEFNIEDCRKFIDFYKQSISKHPEWK
DFGFRFSDTQRYNSIDEFYREVENQGYKLTFENISESYIDSVVNQGKLY
LFQIYNKDFSAYSKGRPNLHTLYWKALFDERNLQDVVYKLNGEAELFYR
KQSIPKKITHPAKEAIANKNKDNPKKESVFEYDLIKDKRFTEDKFFFHC
PITINFKSSGANKFNDEINLLLKEKANDVHILSIDRGERHLAYYTLVDG
KGNIIKQDTFNIIGNDRMKTNYHDKLAAIEKDRDSARKDWKKINNIKEM
KEGYLSQVVHEIAKLVIEYNAIVVFEDLNFGFKRGRFKVEKQVYQKLEK
MLIEKLNYLVFKDNEFDKTGGVLRAYQLTAPFETFKKMGKQTGIIYYVP
AGFTSKICPVTGFVNQLYPKYESVSKSQEFFSKFDKICYNLDKGYFEFS
FDYKNFGDKAAKGKWTIASFGSRLINFRNSDKNHNWDTREVYPTKELEK
LLKDYSIEYGHGECIKAAICGESDKKFFAKLTSVLNTILQMRNSKTGTE
LDYLISPVADVNGNFFDSRQAPKNMPQDAAANGAYHIGLKGLMLLGRIK
NNQEGKKLNLVIKNEEYFEFVQNRNN
Francisella novicida Cpf1 D917A/E1006A (A917,
A1006, and D1255 are bolded and underlined)
(SEQ ID NO: 264)
MSIYQEFVNKYSLSKTLRFELIPQGKTLENIKARGLILDDEKRAKDYKK
AKQIIDKYHQFFIEEILSSVCISEDLLQNYSDVYFKLKKSDDDNLQKDF
KSAKDTIKKQISEYIKDSEKFKNLFNQNLIDAKKGQESDLILWLKQSKD
NGIELFKANSDITDIDEALEIIKSFKGWTTYFKGFHENRKNVYSSNDIP
TSIIYRIVDDNLPKFLENKAKYESLKDKAPEAINYEQIKKDLAEELTFD
IDYKTSEVNQRVFSLDEVFEIANFNNYLNQSGITKFNTIIGGKFVNGEN
TKRKGINEYINLYSQQINDKTLKKYKMSVLFKQILSDTESKSFVIDKLE
DDSDVVTTMQSFYEQIAAFKTVEEKSIKETLSLLFDDLKAQKLDLSKIY
FKNDKSLTDLSQQVFDDYSVIGTAVLEYITQQIAPKNLDNPSKKEQELI
AKKTEKAKYLSLETIKLALEEFNKHRDIDKQCRFEEILANFAAIPMIFD
EIAQNKDNLAQISIKYQNQGKKDLLQASAEDDVKAIKDLLDQTNNLLHK
LKIFHISQSEDKANILDKDEHFYLVFEECYFELANIVPLYNKIRNYITQ
KPYSDEKFKLNFENSTLANGWDKNKEPDNTAILFIKDDKYYLGVMNKKN
NKIFDDKAIKENKGEGYKKIVYKLLPGANKMLPKVFFSAKSIKFYNPSE
DILRIRNHSTHTKNGSPQKGYEKFEFNIEDCRKFIDFYKQSISKHPEWK
DFGFRFSDTQRYNSIDEFYREVENQGYKLTFENISESYIDSVVNQGKLY
LFQIYNKDFSAYSKGRPNLHTLYWKALFDERNLQDVVYKLNGEAELFYR
KQSIPKKITHPAKEAIANKNKDNPKKESVFEYDLIKDKRFTEDKFFFHC
PITINFKSSGANKFNDEINLLLKEKANDVHILSIARGERHLAYYTLVDG
KGNIIKQDTFNIIGNDRMKTNYHDKLAAIEKDRDSARKDWKKINNIKEM
KEGYLSQVVHEIAKLVIEYNAIVVFADLNFGFKRGRFKVEKQVYQKLEK
MLIEKLNYLVFKDNEFDKTGGVLRAYQLTAPFETFKKMGKQTGIIYYVP
AGFTSKICPVTGFVNQLYPKYESVSKSQEFFSKFDKICYNLDKGYFEFS
FDYKNFGDKAAKGKWTIASFGSRLINFRNSDKNHNWDTREVYPTKELEK
LLKDYSIEYGHGECIKAAICGESDKKFFAKLTSVLNTILQMRNSKTGTE
LDYLISPVADVNGNFFDSRQAPKNMPQDADANGAYHIGLKGLMLLGRIK
NNQEGKKLNLVIKNEEYFEFVQNRNN
Francisella novicida Cpf1 D917A/D1255A (A917,
E1006, and A1255 are bolded and underlined)
(SEQ ID NO: 265)
MSIYQEFVNKYSLSKTLRFELIPQGKTLENIKARGLILDDEKRAKDYKK
AKQIIDKYHQFFIEEILSSVCISEDLLQNYSDVYFKLKKSDDDNLQKDF
KSAKDTIKKQISEYIKDSEKFKNLFNQNLIDAKKGQESDLILWLKQSKD
NGIELFKANSDITDIDEALEIIKSFKGWTTYFKGFHENRKNVYSSNDIP
TSIIYRIVDDNLPKFLENKAKYESLKDKAPEAINYEQIKKDLAEELTFD
IDYKTSEVNQRVFSLDEVFEIANFNNYLNQSGITKFNTIIGGKFVNGEN
TKRKGINEYINLYSQQINDKTLKKYKMSVLFKQILSDTESKSFVIDKLE
DDSDVVTTMQSFYEQIAAFKTVEEKSIKETLSLLFDDLKAQKLDLSKIY
FKNDKSLTDLSQQVFDDYSVIGTAVLEYITQQIAPKNLDNPSKKEQELI
AKKTEKAKYLSLETIKLALEEFNKHRDIDKQCRFEEILANFAAIPMIFD
EIAQNKDNLAQISIKYQNQGKKDLLQASAEDDVKAIKDLLDQTNNLLHK
LKIFHISQSEDKANILDKDEHFYLVFEECYFELANIVPLYNKIRNYITQ
KPYSDEKFKLNFENSTLANGWDKNKEPDNTAILFIKDDKYYLGVMNKKN
NKIFDDKAIKENKGEGYKKIVYKLLPGANKMLPKVFFSAKSIKFYNPSE
DILRIRNHSTHTKNGSPQKGYEKFEFNIEDCRKFIDFYKQSISKHPEWK
DFGFRFSDTQRYNSIDEFYREVENQGYKLTFENISESYIDSVVNQGKLY
LFQIYNKDFSAYSKGRPNLHTLYWKALFDERNLQDVVYKLNGEAELFYR
KQSIPKKITHPAKEAIANKNKDNPKKESVFEYDLIKDKRFTEDKFFFHC
PITINFKSSGANKFNDEINLLLKEKANDVHILSIARGERHLAYYTLVDG
KGNIIKQDTFNIIGNDRMKTNYHDKLAAIEKDRDSARKDWKKINNIKEM
KEGYLSQVVHEIAKLVIEYNAIVVFEDLNFGFKRGRFKVEKQVYQKLEK
MLIEKLNYLVFKDNEFDKTGGVLRAYQLTAPFETFKKMGKQTGIIYYVP
AGFTSKICPVTGFVNQLYPKYESVSKSQEFFSKFDKICYNLDKGYFEFS
FDYKNFGDKAAKGKWTIASFGSRLINFRNSDKNHNWDTREVYPTKELEK
LLKDYSIEYGHGECIKAAICGESDKKFFAKLTSVLNTILQMRNSKTGTE
LDYLISPVADVNGNFFDSRQAPKNMPQDAAANGAYHIGLKGLMLLGRIK
NNQEGKKLNLVIKNEEYFEFVQNRNN
Francisella novicida Cpf1 E1006A/D1255A (D917,
A1006, and A1255 are bolded and underlined)
(SEQ ID NO: 266)
MSIYQEFVNKYSLSKTLRFELIPQGKTLENIKARGLILDDEKRAKDYKK
AKQIIDKYHQFFIEEILSSVCISEDLLQNYSDVYFKLKKSDDDNLQKDF
KSAKDTIKKQISEYIKDSEKFKNLFNQNLIDAKKGQESDLILWLKQSKD
NGIELFKANSDITDIDEALEIIKSFKGWTTYFKGFHENRKNVYSSNDIP
TSIIYRIVDDNLPKFLENKAKYESLKDKAPEAINYEQIKKDLAEELTFD
IDYKTSEVNQRVFSLDEVFEIANFNNYLNQSGITKFNTIIGGKFVNGEN
TKRKGINEYINLYSQQINDKTLKKYKMSVLFKQILSDTESKSFVIDKLE
DDSDVVTTMQSFYEQIAAFKTVEEKSIKETLSLLFDDLKAQKLDLSKIY
FKNDKSLTDLSQQVFDDYSVIGTAVLEYITQQIAPKNLDNPSKKEQELI
AKKTEKAKYLSLETIKLALEEFNKHRDIDKQCRFEEILANFAAIPMIFD
EIAQNKDNLAQISIKYQNQGKKDLLQASAEDDVKAIKDLLDQTNNLLHK
LKIFHISQSEDKANILDKDEHFYLVFEECYFELANIVPLYNKIRNYITQ
KPYSDEKFKLNFENSTLANGWDKNKEPDNTAILFIKDDKYYLGVMNKKN
NKIFDDKAIKENKGEGYKKIVYKLLPGANKMLPKVFFSAKSIKFYNPSE
DILRIRNHSTHTKNGSPQKGYEKFEFNIEDCRKFIDFYKQSISKHPEWK
DFGFRFSDTQRYNSIDEFYREVENQGYKLTFENISESYIDSVVNQGKLY
LFQIYNKDFSAYSKGRPNLHTLYWKALFDERNLQDVVYKLNGEAELFYR
KQSIPKKITHPAKEAIANKNKDNPKKESVFEYDLIKDKRFTEDKFFFHC
PITINFKSSGANKFNDEINLLLKEKANDVHILSIDRGERHLAYYTLVDG
KGNIIKQDTFNIIGNDRMKTNYHDKLAAIEKDRDSARKDWKKINNIKEM
KEGYLSQVVHEIAKLVIEYNAIVVFADLNFGFKRGRFKVEKQVYQKLEK
MLIEKLNYLVFKDNEFDKTGGVLRAYQLTAPFETFKKMGKQTGIIYYVP
AGFTSKICPVTGFVNQLYPKYESVSKSQEFFSKFDKICYNLDKGYFEFS
FDYKNFGDKAAKGKWTIASFGSRLINFRNSDKNHNWDTREVYPTKELEK
LLKDYSIEYGHGECIKAAICGESDKKFFAKLTSVLNTILQMRNSKTGTE
LDYLISPVADVNGNFFDSRQAPKNMPQDAAANGAYHIGLKGLMLLGRIK
NNQEGKKLNLVIKNEEYFEFVQNRNN
Francisella novicida Cpf1 D917A/E1006A/D1255A
(A917, A1006, and A1255 are bolded and
underlined)
(SEQ ID NO: 267)
MSIYQEFVNKYSLSKTLRFELIPQGKTLENIKARGLILDDEKRAKDYKK
AKQIIDKYHQFFIEEILSSVCISEDLLQNYSDVYFKLKKSDDDNLQKDF
KSAKDTIKKQISEYIKDSEKFKNLFNQNLIDAKKGQESDLILWLKQSKD
NGIELFKANSDITDIDEALEIIKSFKGWTTYFKGFHENRKNVYSSNDIP
TSIIYRIVDDNLPKFLENKAKYESLKDKAPEAINYEQIKKDLAEELTFD
IDYKTSEVNQRVFSLDEVFEIANFNNYLNQSGITKFNTIIGGKFVNGEN
TKRKGINEYINLYSQQINDKTLKKYKMSVLFKQILSDTESKSFVIDKLE
DDSDVVTTMQSFYEQIAAFKTVEEKSIKETLSLLFDDLKAQKLDLSKIY
FKNDKSLTDLSQQVFDDYSVIGTAVLEYITQQIAPKNLDNPSKKEQELI
AKKTEKAKYLSLETIKLALEEFNKHRDIDKQCRFEEILANFAAIPMIFD
EIAQNKDNLAQISIKYQNQGKKDLLQASAEDDVKAIKDLLDQTNNLLHK
LKIFHISQSEDKANILDKDEHFYLVFEECYFELANIVPLYNKIRNYITQ
KPYSDEKFKLNFENSTLANGWDKNKEPDNTAILFIKDDKYYLGVMNKKN
NKIFDDKAIKENKGEGYKKIVYKLLPGANKMLPKVFFSAKSIKFYNPSE
DILRIRNHSTHTKNGSPQKGYEKFEFNIEDCRKFIDFYKQSISKHPEWK
DFGFRFSDTQRYNSIDEFYREVENQGYKLTFENISESYIDSVVNQGKLY
LFQIYNKDFSAYSKGRPNLHTLYWKALFDERNLQDVVYKLNGEAELFYR
KQSIPKKITHPAKEAIANKNKDNPKKESVFEYDLIKDKRFTEDKFFFHC
PITINFKSSGANKFNDEINLLLKEKANDVHILSIARGERHLAYYTLVDG
KGNIIKQDTFNIIGNDRMKTNYHDKLAAIEKDRDSARKDWKKINNIKEM
KEGYLSQVVHEIAKLVIEYNAIVVFADLNFGFKRGRFKVEKQVYQKLEK
MLIEKLNYLVFKDNEFDKTGGVLRAYQLTAPFETFKKMGKQTGIIYYVP
AGFTSKICPVTGFVNQLYPKYESVSKSQEFFSKFDKICYNLDKGYFEFS
FDYKNFGDKAAKGKWTIASFGSRLINFRNSDKNHNWDTREVYPTKELEK
LLKDYSIEYGHGECIKAAICGESDKKFFAKLTSVLNTILQMRNSKTGTE
LDYLISPVADVNGNFFDSRQAPKNMPQDAAANGAYHIGLKGLMLLGRIK
NNQEGKKLNLVIKNEEYFEFVQNRNN

[0220] In some embodiments, the guide nucleotide sequence-programmable DNA binding protein is a Cpf1 protein from a Acidaminococcus species (AsCpf1). Cpf1 proteins form Acidaminococcus species have been described previously and would be apparent to the skilled artisan. Exemplary Acidaminococcus Cpf1 proteins (AsCpf1) include, without limitation, any of the AsCpf1 proteins provided herein.

Wild-type AsCpf1-Residue R912 is indicated in
bold underlining and residues 661-667 are
indicated in italics and underlining.
(SEQ ID NO: 1060)
TQFEGFTNLYQVSKTLRFELIPQGKTLKHIQEQGFIEEDKARNDHYKEL
KPIIDRIYKTYADQCLQLVQLDWENLSAAIDSYRKEKTEETRNALIEEQ
ATYRNAIHDYFIGRTDNLTDAINKRHAEIYKGLFKAELFNGKVLKQLGT
VTTTEHENALLRSFDKFTTYFSGFYENRKNVFSAEDISTAIPHRIVQDN
FPKFKENCHIFTRLITAVPSLREHFENVKKAIGIFVSTSIEEVFSFPFY
NQLLTQTQIDLYNQLLGGISREAGTEKIKGLNEVLNLAIQKNDETAHII
ASLPHRFIPLFKQILSDRNTLSFILEEFKSDEEVIQSFCKYKTLLRNEN
VLETAEALFNELNSIDLTHIFISHKKLETISSALCDHWDTLRNALYERR
ISELTGKITKSAKEKVQRSLKHEDINLQEIISAAGKELSEAFKQKTSEI
LSHAHAALDQPLPTTMLKKQEEKEILKSQLDSLLGLYHLLDWFAVDESN
EVDPEFSARLTGIKLEMEPSLSFYNKARNYATKKPYSVEKFKLNFQMPT
LASGWDVNKEKNNGAILFVKNGLYYLGIMPKQKGRYKALSFEPTEKTSE
GFDKMYYDYFPDAAKMIPKCSTQLKAVTAHFQTHTTPILLSNNFIEPLE
ITKEIYDLNNPEKEPKKFQTAYAKKTGDQKGYREALCKWIDFTRDFLSK
YTKTTSIDLSSLRPSSQYKDLGEYYAELNPLLYHISFQRIAEKEIMDAV
ETGKLYLFQIYNKDFAKGHHGKPNLHTLYWTGLFSPENLAKTSIKLNGQ
AELFYRPKSRMKRMAHRLGEKMLNKKLKDQKTPIPDTLYQELYDYVNHR
LSHDLSDEARALLPNVITKEVSHEIIKDRRFTSDKFFFHVPITLNYQAA
NSPSKFNQRVNAYLKEHPETPIIGIDRGERNLIYITVIDSTGKILEQRS
LNTIQQFDYQKKLDNREKERVAARQAWSVVGTIKDLKQGYLSQVIHEIV
DLMIHYQAVVVLENLNFGFKSKRTGIAEKAVYQQFEKMLIDKLNCLVLK
DYPAEKVGGVLNPYQLTDQFTSFAKMGTQSGFLFYVPAPYTSKIDPLTG
FVDPFVWKTIKNHESRKHFLEGFDFLHYDVKTGDFILHFKMNRNLSFQR
GLPGFMPAWDIVFEKNETQFDAKGTPFIAGKRIVPVIENHRFTGRYRDL
YPANELIALLEEKGIVFRDGSNILPKLLENDDSHAIDTMVALIRSVLQM
RNSNAATGEDYINSPVRDLNGVCFDSRFQNPEWPMDADANGAYHIALKG
QLLLNHLKESKDLKLQNGISNQDWLAYIQELRN
AsCpf1(R912A)-Residue A912 is indicated in bold
underlining and residues 661-667 are indicated in
italics and underlining.
(SEQ ID NO: 1061)
TQFEGFTNLYQVSKTLRFELIPQGKTLKHIQEQGFIEEDKARNDHYKEL
KPIIDRIYKTYADQCLQLVQLDWENLSAAIDSYRKEKTEETRNALIEEQ
ATYRNAIHDYFIGRTDNLTDAINKRHAEIYKGLFKAELFNGKVLKQLGT
VTTTEHENALLRSFDKFTTYFSGFYENRKNVFSAEDISTAIPHRIVQDN
FPKFKENCHIFTRLITAVPSLREHFENVKKAIGIFVSTSIEEVFSFPFY
NQLLTQTQIDLYNQLLGGISREAGTEKIKGLNEVLNLAIQKNDETAHII
ASLPHRFIPLFKQILSDRNTLSFILEEFKSDEEVIQSFCKYKTLLRNEN
VLETAEALFNELNSIDLTHIFISHKKLETISSALCDHWDTLRNALYERR
ISELTGKITKSAKEKVQRSLKHEDINLQEIISAAGKELSEAFKQKTSEI
LSHAHAALDQPLPTTMLKKQEEKEILKSQLDSLLGLYHLLDWFAVDESN
EVDPEFSARLTGIKLEMEPSLSFYNKARNYATKKPYSVEKFKLNFQMPT
LASGWDVNKEKNNGAILFVKNGLYYLGIMPKQKGRYKALSFEPTEKTSE
GFDKMYYDYFPDAAKMIPKCSTQLKAVTAHFQTHTTPILLSNNFIEPLE
ITKEIYDLNNPEKEPKKFQTAYAKKTGDQKGYREALCKWIDFTRDFLSK
YTKTTSIDLSSLRPSSQYKDLGEYYAELNPLLYHISFQRIAEKEIMDAV
ETGKLYLFQIYNKDFAKGHHGKPNLHTLYWTGLFSPENLAKTSIKLNGQ
AELFYRPKSRMKRMAHRLGEKMLNKKLKDQKTPIPDTLYQELYDYVNHR
LSHDLSDEARALLPNVITKEVSHEIIKDRRFTSDKFFFHVPITLNYQAA
NSPSKFNQRVNAYLKEHPETPIIGIDRGEANLIYITVIDSTGKILEQRS
LNTIQQFDYQKKLDNREKERVAARQAWSVVGTIKDLKQGYLSQVIHEIV
DLMIHYQAVVVLENLNFGFKSKRTGIAEKAVYQQFEKMLIDKLNCLVLK
DYPAEKVGGVLNPYQLTDQFTSFAKMGTQSGFLFYVPAPYTSKIDPLTG
FVDPFVWKTIKNHESRKHFLEGFDFLHYDVKTGDFILHFKMNRNLSFQR
GLPGFMPAWDIVFEKNETQFDAKGTPFIAGKRIVPVIENHRFTGRYRDL
YPANELIALLEEKGIVFRDGSNILPKLLENDDSHAIDTMVALIRSVLQM
RNSNAATGEDYINSPVRDLNGVCFDSRFQNPEWPMDADANGAYHIALKG
QLLLNHLKESKDLKLQNGISNQDWLAYIQELRN

[0221] In some embodiments, the nucleic acid programmable DNA binding protein is a Cpf1 protein from a Lachnospiraceae species (LbCpf1). Cpf1 proteins form Lachnospiraceae species have been described previously have been described previously and would be apparent to the skilled artisan. Exemplary Lachnospiraceae Cpf1 proteins (LbCpf1) include, without limitation, any of the LbCpf1 proteins provided herein.

Wild-type LbCpf1
(SEQ ID NO: 1062)
MSKLEKFTNCYSLSKTERFKAIPVGKTQENIDNKRELVEDEKRAEDYKG
VKKELDRYYLSFINDVLHSIKLKNENNYISLFRKKTRTEKENKELENLE
INERKEIAKAFKGNEGYKSLFKKDIIETILPEFLDDKDEIALVNSFNGF
TTAFTGFFDNRENMFSEEAKSTSIAFRCINENLTRYISNMDIFEKVDAI
FDKHEVQEIKEKILNSDYDVEDFFEGEFFNFVETQEGIDVYNAIIGGFV
TESGEKIKGENEYINLYNQKTKQKLPKFKPLYKQVLSDRESESFYGEGY
TSDEEVLEVFRNTLNKNSEIFSSIKKLEKLFKNFDEYSSAGIFVKNGPA
ISTISKDIFGEWNVIRDKWNAEYDDIHLKKKAVVTEKYEDDRRKSFKKI
GSFSLEQLQEYADADLSVVEKLKEIIIQKVDEIYKVYGSSEKLFDADFV
LEKSLKKNDAVVAIMKDELDSVKSFENYIKAFFGEGKETNRDESFYGDF
VLAYDILLKVDHIYDAIRNYVTQKPYSKDKFKLYFQNPQFMGGWDKDKE
TDYRATILRYGSKYYLAIMDKKYAKCLQKIDKDDVNGNYEKINYKELPG
PNKMLPKVFFSKKWMAYYNPSEDIQKIYKNGTFKKGDMFNENDCHKLID
FFKDSISRYPKWSNAYDFNFSETEKYKDIAGFYREVEEQGYKVSFESAS
KKEVDKLVEEGKLYMFQIYNKDFSDKSHGTPNEHTMYFKLLFDENNHGQ
IRLSGGAELFMRRASEKKEELVVHPANSPIANKNPDNPKKTTTLSYDVY
KDKRFSEDQYELHIPIAINKCPKNIFKINTEVRVELKHDDNPYVIGIDR
GERNLLYIVVVDGKGNIVEQYSLNEIINNFNGIRIKTDYHSELDKKEKE
RFEARQNWTSIENIKELKAGYISQVVHKICELVEKYDAVIALEDENSGF
KNSRVKVEKQVYQKFEKMLIDKLNYMVDKKSNPCATGGALKGYQITNKF
ESFKSMSTQNGFIFYIPAWLTSKIDPSTGFVNLEKTKYTSIADSKKFIS
SFDRIMYVPEEDLFEFALDYKNFSRTDADYIKKWKLYSYGNRIRIFRNP
KKNNVFDWEEVCLTSAYKELFNKYGINYQQGDIRALLCEQSDKAFYSSF
MALMSLMLQMRNSITGRTDVDFLISPVKNSDGIFYDSRNYEAQENAILP
KNADANGAYNIARKVLWAIGQFKKAEDEKLDKVKIAISNKEWLEYAQTS
VKH
LbCpf1 (R836A)
(SEQ ID NO: 1063)
MSKLEKFTNCYSLSKTERFKAIPVGKTQENIDNKRELVEDEKRAEDYKG
VKKELDRYYLSFINDVLHSIKLKNENNYISLFRKKTRTEKENKELENLE
INERKEIAKAFKGNEGYKSLFKKDIIETILPEFLDDKDEIALVNSFNGF
TTAFTGFFDNRENMFSEEAKSTSIAFRCINENLTRYISNMDIFEKVDAI
FDKHEVQEIKEKILNSDYDVEDFFEGEFFNFVETQEGIDVYNAIIGGFV
TESGEKIKGENEYINLYNQKTKQKLPKFKPLYKQVLSDRESESFYGEGY
TSDEEVLEVFRNTLNKNSEIFSSIKKLEKLFKNFDEYSSAGIFVKNGPA
ISTISKDIFGEWNVIRDKWNAEYDDIHLKKKAVVTEKYEDDRRKSFKKI
GSFSLEQLQEYADADLSVVEKLKEIIIQKVDEIYKVYGSSEKLFDADFV
LEKSLKKNDAVVAIMKDELDSVKSFENYIKAFFGEGKETNRDESFYGDF
VLAYDILLKVDHIYDAIRNYVTQKPYSKDKFKLYFQNPQFMGGWDKDKE
TDYRATILRYGSKYYLAIMDKKYAKCLQKIDKDDVNGNYEKINYKELPG
PNKMLPKVFFSKKWMAYYNPSEDIQKIYKNGTFKKGDMFNENDCHKLID
FFKDSISRYPKWSNAYDFNFSETEKYKDIAGFYREVEEQGYKVSFESAS
KKEVDKLVEEGKLYMFQIYNKDFSDKSHGTPNEHTMYFKLLFDENNHGQ
IRLSGGAELFMRRASEKKEELVVHPANSPIANKNPDNPKKTTTLSYDVY
KDKRFSEDQYELHIPIAINKCPKNIFKINTEVRVELKHDDNPYVIGIDR
GEANLLYIVVVDGKGNIVEQYSLNEIINNFNGIRIKTDYHSELDKKEKE
RFEARQNWTSIENIKELKAGYISQVVHKICELVEKYDAVIALEDENSGF
KNSRVKVEKQVYQKFEKMLIDKLNYMVDKKSNPCATGGALKGYQITNKF
ESFKSMSTQNGFIFYIPAWLTSKIDPSTGFVNLEKTKYTSIADSKKFIS
SFDRIMYVPEEDLFEFALDYKNFSRTDADYIKKWKLYSYGNRIRIFRNP
KKNNVFDWEEVCLTSAYKELFNKYGINYQQGDIRALLCEQSDKAFYSSF
MALMSLMLQMRNSITGRTDVDFLISPVKNSDGIFYDSRNYEAQENAILP
KNADANGAYNIARKVLWAIGQFKKAEDEKLDKVKIAISNKEWLEYAQTS
VKH
LbCpf1 (R1138A)
(SEQ ID NO: 1064)
MSKLEKFTNCYSLSKTERFKAIPVGKTQENIDNKRELVEDEKRAEDYKG
VKKELDRYYLSFINDVLHSIKLKNENNYISLFRKKTRTEKENKELENLE
INERKEIAKAFKGNEGYKSLFKKDIIETILPEFLDDKDEIALVNSFNGF
TTAFTGFFDNRENMFSEEAKSTSIAFRCINENLTRYISNMDIFEKVDAI
FDKHEVQEIKEKILNSDYDVEDFFEGEFFNFVETQEGIDVYNAIIGGFV
TESGEKIKGENEYINLYNQKTKQKLPKFKPLYKQVLSDRESESFYGEGY
TSDEEVLEVFRNTLNKNSEIFSSIKKLEKLFKNFDEYSSAGIFVKNGPA
ISTISKDIFGEWNVIRDKWNAEYDDIHLKKKAVVTEKYEDDRRKSFKKI
GSFSLEQLQEYADADLSVVEKLKEIIIQKVDEIYKVYGSSEKLFDADFV
LEKSLKKNDAVVAIMKDELDSVKSFENYIKAFFGEGKETNRDESFYGDF
VLAYDILLKVDHIYDAIRNYVTQKPYSKDKFKLYFQNPQFMGGWDKDKE
TDYRATILRYGSKYYLAIMDKKYAKCLQKIDKDDVNGNYEKINYKELPG
PNKMLPKVFFSKKWMAYYNPSEDIQKIYKNGTFKKGDMFNENDCHKLID
FFKDSISRYPKWSNAYDFNFSETEKYKDIAGFYREVEEQGYKVSFESAS
KKEVDKLVEEGKLYMFQIYNKDFSDKSHGTPNEHTMYFKLLFDENNHGQ
IRLSGGAELFMRRASEKKEELVVHPANSPIANKNPDNPKKTTTLSYDVY
KDKRFSEDQYELHIPIAINKCPKNIFKINTEVRVELKHDDNPYVIGIDR
GERNLLYIVVVDGKGNIVEQYSLNEIINNFNGIRIKTDYHSELDKKEKE
RFEARQNWTSIENIKELKAGYISQVVHKICELVEKYDAVIALEDENSGF
KNSRVKVEKQVYQKFEKMLIDKLNYMVDKKSNPCATGGALKGYQITNKF
ESFKSMSTQNGFIFYIPAWLTSKIDPSTGFVNLEKTKYTSIADSKKFIS
SFDRIMYVPEEDLFEFALDYKNFSRTDADYIKKWKLYSYGNRIRIFRNP
KKNNVFDWEEVCLTSAYKELFNKYGINYQQGDIRALLCEQSDKAFYSSF
MALMSLMLQMANSITGRTDVDFLISPVKNSDGIFYDSRNYEAQENAILP
KNADANGAYNIARKVLWAIGQFKKAEDEKLDKVKIAISNKEWLEYAQTS
VKH

[0222] In some embodiments, the Cpf1 protein is a crippled Cpf1 protein. As used herein a “crippled Cpf1” protein is a Cpf1 protein having diminished nuclease activity as compared to a wild-type Cpf1 protein. In some embodiments, the crippled Cpf1 protein preferentially cuts the target strand more efficiently than the non-target strand. For example, the Cpf1 protein preferentially cuts the strand of a duplexed nucleic acid molecule in which a nucleotide to be edited resides. In some embodiments, the crippled Cpf1 protein preferentially cuts the non-target strand more efficiently than the target strand. For example, the Cpf1 protein preferentially cuts the strand of a duplexed nucleic acid molecule in which a nucleotide to be edited does not reside. In some embodiments, the crippled Cpf1 protein preferentially cuts the target strand at least 5% more efficiently than it cuts the non-target strand. In some embodiments, the crippled Cpf1 protein preferentially cuts the target strand at least 5%, 10%, 15%, 20%, 25%, 30%, 35%, 40%, 50%, 60%, 70%, 80%, 90%, or at least 100% more efficiently than it cuts the non-target strand.

[0223] In some embodiments, a crippled Cpf1 protein is a non-naturally occurring Cpf1 protein. In some embodiments, the crippled Cpf1 protein comprises one or more mutations relative to a wild-type Cpf1 protein. In some embodiments, the crippled Cpf1 protein comprises 1, 2, 3, 4, 5, 6, 7, 8, 9, 10, 11, 12, 13, 14, 15, 16, 17, 18, 19, or 20 mutations relative to a wild-type Cpf1 protein. In some embodiments, the crippled Cpf1 protein comprises an R836A mutation mutation as set forth in SEQ ID NO: 763, or in a corresponding amino acid in another Cpf1 protein. It should be appreciated that a Cpf1 comprising a homologous residue (e.g., a corresponding amino acid) to R836A of SEQ ID NO: 763 could also be mutated to achieve similar results. In some embodiments, the crippled Cpf1 protein comprises a R1138A mutation as set forth in SEQ ID NO: 763, or in a corresponding amino acid in another Cpf1 protein. In some embodiments, the crippled Cpf1 protein comprises an R912A mutation mutation as set forth in SEQ ID NO: 762, or in a corresponding amino acid in another Cpf1 protein. Without wishing to be bound by any particular theory, residue R838 of SEQ ID NO: 763 (LbCpf1) and residue R912 of SEQ ID NO: 762 (AsCpf1) are examples of corresponding (e.g., homologous) residues. For example, a portion of the alignment between SEQ ID NO: 762 and 763 shows that R912 and R838 are corresponding residues.

[0224] In some embodiments, any of the Cpf1 proteins provided herein comprises one or more amino acid deletions. In some embodiments, any of the Cpf1 proteins provided herein comprises 1, 2, 3, 4, 5, 6, 7, 8, 9, 10, 11, 12, 13, 14, 15, 16, 17, 18, 19, or 20 amino acid deletions. Without wishing to be bound by any particular theory, there is a helical region in Cpf1, which includes residues 661-667 of AsCpf1 (SEQ ID NO: 762), that may obstruct the function of a deaminase (e.g., APOBEC) that is fused to the Cpf1. This region comprises the amino acid sequence KKTGDQK. Accordingly, aspects of the disclosure provide Cpf1 proteins comprising mutations (e.g., deletions) that disrupt this helical region in Cpf1. In some embodiments, the Cpf1 protein comprises one or more deletions of the following residues in SEQ ID NO: 762, or one or more corresponding deletions in another Cpf1 protein: K661, K662, T663, G664, D665, Q666, and K667. In some embodiments, the Cpf1 protein comprises a T663 and a D665 deletion in SEQ ID NO: 762, or corresponding deletions in another Cpf1 protein. In some embodiments, the Cpf1 protein comprises a K662, T663, D665, and Q666 deletion in SEQ ID NO: 762, or corresponding deletions in another Cpf1 protein. In some embodiments, the Cpf1 protein comprises a K661, K662, T663, D665, Q666 and K667 deletion in SEQ ID NO: 762, or corresponding deletions in another Cpf1 protein.

AsCpf1 (deleted T663 and D665)
(SEQ ID NO: 1065)
TQFEGFTNLYQVSKTLRFELIPQGKTLKHIQEQGFIEEDKARNDHYKEL
KPIIDRIYKTYADQCLQLVQLDWENLSAAIDSYRKEKTEETRNALIEEQ
ATYRNAIHDYFIGRTDNLTDAINKRHAEIYKGLFKAELFNGKVLKQLGT
VTTTEHENALLRSFDKFTTYFSGFYENRKNVFSAEDISTAIPHRIVQDN
FPKFKENCHIFTRLITAVPSLREHFENVKKAIGIFVSTSIEEVFSFPFY
NQLLTQTQIDLYNQLLGGISREAGTEKIKGLNEVLNLAIQKNDETAHII
ASLPHRFIPLFKQILSDRNTLSFILEEFKSDEEVIQSFCKYKTLLRNEN
VLETAEALFNELNSIDLTHIFISHKKLETISSALCDHWDTLRNALYERR
ISELTGKITKSAKEKVQRSLKHEDINLQEIISAAGKELSEAFKQKTSEI
LSHAHAALDQPLPTTMLKKQEEKEILKSQLDSLLGLYHLLDWFAVDESN
EVDPEFSARLTGIKLEMEPSLSFYNKARNYATKKPYSVEKFKLNFQMPT
LASGWDVNKEKNNGAILFVKNGLYYLGIMPKQKGRYKALSFEPTEKTSE
GFDKMYYDYFPDAAKMIPKCSTQLKAVTAHFQTHTTPILLSNNFIEPLE
ITKEIYDLNNPEKEPKKFQTAYAKKGQKGYREALCKWIDFTRDFLSKYT
KTTSIDLSSLRPSSQYKDLGEYYAELNPLLYHISFQRIAEKEIMDAVET
GKLYLFQIYNKDFAKGHHGKPNLHTLYWTGLFSPENLAKTSIKLNGQAE
LFYRPKSRMKRMAHRLGEKMLNKKLKDQKTPIPDTLYQELYDYVNHRLS
HDLSDEARALLPNVITKEVSHEIIKDRRFTSDKFFFHVPITLNYQAANS
PSKFNQRVNAYLKEHPETPIIGIDRGERNLIYITVIDSTGKILEQRSLN
TIQQFDYQKKLDNREKERVAARQAWSVVGTIKDLKQGYLSQVIHEIVDL
MIHYQAVVVLENLNFGFKSKRTGIAEKAVYQQFEKMLIDKLNCLVLKDY
PAEKVGGVLNPYQLTDQFTSFAKMGTQSGFLFYVPAPYTSKIDPLTGFV
DPFVWKTIKNHESRKHFLEGFDFLHYDVKTGDFILHFKMNRNLSFQRGL
PGFMPAWDIVFEKNETQFDAKGTPFIAGKRIVPVIENHRFTGRYRDLYP
ANELIALLEEKGIVFRDGSNILPKLLENDDSHAIDTMVALIRSVLQMRN
SNAATGEDYINSPVRDLNGVCFDSRFQNPEWPMDADANGAYHIALKGQL
LLNHLKESKDLKLQNGISNQDWLAYIQELRN
AsCpf1 (deleted K662, T663, D665, and Q666)
(SEQ ID NO: 1066)
TQFEGFTNLYQVSKTLRFELIPQGKTLKHIQEQGFIEEDKARNDHYKEL
KPIIDRIYKTYADQCLQLVQLDWENLSAAIDSYRKEKTEETRNALIEEQ
ATYRNAIHDYFIGRTDNLTDAINKRHAEIYKGLFKAELFNGKVLKQLGT
VTTTEHENALLRSFDKFTTYFSGFYENRKNVFSAEDISTAIPHRIVQDN
FPKFKENCHIFTRLITAVPSLREHFENVKKAIGIFVSTSIEEVFSFPFY
NQLLTQTQIDLYNQLLGGISREAGTEKIKGLNEVLNLAIQKNDETAHII
ASLPHRFIPLFKQILSDRNTLSFILEEFKSDEEVIQSFCKYKTLLRNEN
VLETAEALFNELNSIDLTHIFISHKKLETISSALCDHWDTLRNALYERR
ISELTGKITKSAKEKVQRSLKHEDINLQEIISAAGKELSEAFKQKTSEI
LSHAHAALDQPLPTTMLKKQEEKEILKSQLDSLLGLYHLLDWFAVDESN
EVDPEFSARLTGIKLEMEPSLSFYNKARNYATKKPYSVEKFKLNFQMPT
LASGWDVNKEKNNGAILFVKNGLYYLGIMPKQKGRYKALSFEPTEKTSE
GFDKMYYDYFPDAAKMIPKCSTQLKAVTAHFQTHTTPILLSNNFIEPLE
ITKEIYDLNNPEKEPKKFQTAYAKGKGYREALCKWIDFTRDFLSKYTKT
TSIDLSSLRPSSQYKDLGEYYAELNPLLYHISFQRIAEKEIMDAVETGK
LYLFQIYNKDFAKGHHGKPNLHTLYWTGLFSPENLAKTSIKLNGQAELF
YRPKSRMKRMAHRLGEKMLNKKLKDQKTPIPDTLYQELYDYVNHRLSHD
LSDEARALLPNVITKEVSHEIIKDRRFTSDKFFFHVPITLNYQAANSPS
KFNQRVNAYLKEHPETPIIGIDRGERNLIYITVIDSTGKILEQRSLNTI
QQFDYQKKLDNREKERVAARQAWSVVGTIKDLKQGYLSQVIHEIVDLMI
HYQAVVVLENLNFGFKSKRTGIAEKAVYQQFEKMLIDKLNCLVLKDYPA
EKVGGVLNPYQLTDQFTSFAKMGTQSGFLFYVPAPYTSKIDPLTGFVDP
FVWKTIKNHESRKHFLEGFDFLHYDVKTGDFILHFKMNRNLSFQRGLPG
FMPAWDIVFEKNETQFDAKGTPFIAGKRIVPVIENHRFTGRYRDLYPAN
ELIALLEEKGIVFRDGSNILPKLLENDDSHAIDTMVALIRSVLQMRNSN
AATGEDYINSPVRDLNGVCFDSRFQNPEWPMDADANGAYHIALKGQLLL
NHLKESKDLKLQNGISNQDWLAYIQELRN
AsCpf1 (deleted K661, K662, T663, D665, Q666, and
K667)
(SEQ ID NO: 1067)
TQFEGFTNLYQVSKTLRFELIPQGKTLKHIQEQGFIEEDKARNDHYKEL
KPIIDRIYKTYADQCLQLVQLDWENLSAAIDSYRKEKTEETRNALIEEQ
ATYRNAIHDYFIGRTDNLTDAINKRHAEIYKGLFKAELFNGKVLKQLGT
VTTTEHENALLRSFDKFTTYFSGFYENRKNVFSAEDISTAIPHRIVQDN
FPKFKENCHIFTRLITAVPSLREHFENVKKAIGIFVSTSIEEVFSFPFY
NQLLTQTQIDLYNQLLGGISREAGTEKIKGLNEVLNLAIQKNDETAHII
ASLPHRFIPLFKQILSDRNTLSFILEEFKSDEEVIQSFCKYKTLLRNEN
VLETAEALFNELNSIDLTHIFISHKKLETISSALCDHWDTLRNALYERR
ISELTGKITKSAKEKVQRSLKHEDINLQEIISAAGKELSEAFKQKTSEI
LSHAHAALDQPLPTTMLKKQEEKEILKSQLDSLLGLYHLLDWFAVDESN
EVDPEFSARLTGIKLEMEPSLSFYNKARNYATKKPYSVEKFKLNFQMPT
LASGWDVNKEKNNGAILFVKNGLYYLGIMPKQKGRYKALSFEPTEKTSE
GFDKMYYDYFPDAAKMIPKCSTQLKAVTAHFQTHTTPILLSNNFIEPLE
ITKEIYDLNNPEKEPKKFQTAYAGGYREALCKWIDFTRDFLSKYTKTTS
IDLSSLRPSSQYKDLGEYYAELNPLLYHISFQRIAEKEIMDAVETGKLY
LFQIYNKDFAKGHHGKPNLHTLYWTGLFSPENLAKTSIKLNGQAELFYR
PKSRMKRMAHRLGEKMLNKKLKDQKTPIPDTLYQELYDYVNHRLSHDLS
DEARALLPNVITKEVSHEIIKDRRFTSDKFFFHVPITLNYQAANSPSKF
NQRVNAYLKEHPETPIIGIDRGERNLIYITVIDSTGKILEQRSLNTIQQ
FDYQKKLDNREKERVAARQAWSVVGTIKDLKQGYLSQVIHEIVDLMIHY
QAVVVLENLNFGFKSKRTGIAEKAVYQQFEKMLIDKLNCLVLKDYPAEK
VGGVLNPYQLTDQFTSFAKMGTQSGFLFYVPAPYTSKIDPLTGFVDPFV
WKTIKNHESRKHFLEGFDFLHYDVKTGDFILHFKMNRNLSFQRGLPGFM
PAWDIVFEKNETQFDAKGTPFIAGKRIVPVIENHRFTGRYRDLYPANEL
IALLEEKGIVFRDGSNILPKLLENDDSHAIDTMVALIRSVLQMRNSNAA
TGEDYINSPVRDLNGVCFDSRFQNPEWPMDADANGAYHIALKGQLLLNH
LKESKDLKLQNGISNQDWLAYIQELRN

[0225] In some embodiments, the guide nucleotide sequence-programmable DNA-binding protein domain of the present disclosure has no requirements for a PAM sequence. One example of such guide nucleotide sequence-programmable DNA-binding protein may be an Argonaute protein from Natronobacterium gregoryi (NgAgo). NgAgo is a ssDNA-guided endonuclease. NgAgo binds 5′ phosphorylated ssDNA of ˜24 nucleotides (gDNA) to guide it to its target site and will make DNA double-strand breaks at gDNA site. In contrast to Cas9, the NgAgo-gDNA system does not require a protospacer-adjacent motif (PAM). Using a nuclease inactive NgAgo (dNgAgo) can greatly expand the codons that may be targeted. The characterization and use of NgAgo have been described in Gao et al., Nat Biotechnol. Epub 2016 May 2. PubMed PMID: 27136078; Swarts et al., Nature. 507(7491) (2014):258-61; and Swarts et al., Nucleic Acids Res. 43(10) (2015):5120-9, each of which are incorporated herein by reference. The sequence of Natronobacterium gregoryi Argonaute is provided in SEQ ID NO: 270.

Wild type Natronobacterium gregoryi Argonaute
(SEQ ID NO: 270)
MTVIDLDSTTTADELTSGHTYDISVTLTGVYDNTDEQHPRMSLAFEQDN
GERRYITLWKNTTPKDVFTYDYATGSTYIFTNIDYEVKDGYENLTATYQ
TTVENATAQEVGTTDEDETFAGGEPLDHHLDDALNETPDDAETESDSGH
VMTSFASRDQLPEWTLHTYTLTATDGAKTDTEYARRTLAYTVRQELYTD
HDAAPVATDGLMLLTPEPLGETPLDLDCGVRVEADETRTLDYTTAKDRL
LARELVEEGLKRSLWDDYLVRGIDEVLSKEPVLTCDEFDLHERYDLSVE
VGHSGRAYLHINFRHRFVPKLTLADIDDDNIYPGLRVKTTYRPRRGHIV
WGLRDECATDSLNTLGNQSVVAYHRNNQTPINTDLLDAIEAADRRVVET
RRQGHGDDAVSFPQELLAVEPNTHQIKQFASDGFHQQARSKTRLSASRC
SEKAQAFAERLDPVRLNGSTVEFSSEFFTGNNEQQLRLLYENGESVLTF
RDGARGAHPDETFSKGIVNPPESFEVAVVLPEQQADTCKAQWDTMADLL
NQAGAPPTRSETVQYDAFSSPESISLNVAGAIDPSEVDAAFVVLPPDQE
GFADLASPTETYDELKKALANMGIYSQMAYFDRFRDAKIFYTRNVALGL
LAAAGGVAFTTEHAMPGDADMFIGIDVSRSYPEDGASGQINIAATATAV
YKDGTILGHSSTRPQLGEKLQSTDVRDIMKNAILGYQQVTGESPTHIVI
HRDGFMNEDLDPATEFLNEQGVEYDIVEIRKQPQTRLLAVSDVQYDTPV
KSIAAINQNEPRATVATFGAPEYLATRDGGGLPRPIQIERVAGETDIET
LTRQVYLLSQSHIQVHNSTARLPITTAYADQASTHATKGYLVQTGAFES
NVGFL

[0226] Also provided herein are Cas9 variants that have relaxed PAM requirements (PAMless Cas9). PAMless Cas9 exhibits an increased activity on a target sequence that does not include a canonical PAM (e.g., NGG) at its 3′-end as compared to Streptococcus pyogenes Cas9 as provided by SEQ ID NO: 1, e.g., increased activity by at least 5-fold, at least 10-fold, at least 50-fold, at least 100-fold, at least 500-fold, at least 1,000-fold, at least 5,000-fold, at least 10,000-fold, at least 50,000-fold, at least 100,000-fold, at least 500,000-fold, or at least 1,000,000-fold. Such Cas9 variants that have relaxed PAM requirements are described in U.S. Provisional Applications 62/245,828, 62/279,346, 62/311,763, 62/322,178, and 62/357,332, each of which is incorporated herein by reference. In some embodiments, the dCas9 or Cas9 nickase useful in the present disclosure may further comprise mutations that relax the PAM requirements, e.g., mutations that correspond to A262T, K294R, S409I, E480K, E543D, M694I, or E1219V in SEQ ID NO: 1.

[0227] Other on-limiting, exemplary Cas9 variants (including dCas9, Cas9 nickase, and Cas9 variants with alternative PAM requirements) suitable for use in the nucleobase editors described herein and their respective sequence are provided below.

VRER-nCas9 (D10A/D1135V/G1218R/R1335E/T1337R) S.
pyogenes Cas9 Nickase
(SEQ ID NO: 821)
MDKKYSIGLAIGTNSVGWAVITDEYKVPSKKFKVEGNTDRHSIKKNLIG
ALLFDSGETAEATREKRTARRRYTRRKNRICYLQEIFSNEMAKVDDSFF
HRLEESFLVEEDKKHERHPIFGNIVDEVAYHEKYPTIYHLRKKLVDSTD
KADERLIYLALAHMIKFRGHFLIEGDENPDNSDVDKLFIQLVQTYNQLF
EENPINASGVDAKAILSARESKSRRLENLIAQLPGEKKNGLFGNLIALS
EGLTPNFKSNFDLAEDAKLQLSKDTYDDDLDNLLAQIGDQYADEFLAAK
NESDAILLSDIERVNTEITKAPLSASMIKRYDEHHQDLTELKALVRQQL
PEKYKEIFFDQSKNGYAGYIDGGASQEEFYKFIKPILEKMDGTEELLVK
LNREDLERKQRTFDNGSIPHQIHLGELHAILRRQEDFYPFLKDNREKIE
KILTFRIPYYVGPLARGNSRFAWMTRKSEETITPWNFEEVVDKGASAQS
FIERMTNFDKNEPNEKVLPKHSLLYEYFTVYNELTKVKYVTEGMRKPAF
LSGEQKKAIVDELFKTNRKVTVKQLKEDYFKKIECFDSVEISGVEDRFN
ASLGTYHDLLKIIKDKDFLDNEENEDILEDIVETLTLFEDREMIEERLK
TYAHLFDDKVMKQEKRRRYTGWGRLSRKLINGIRDKQSGKTILDFLKSD
GFANRNFMQLIHDDSLTFKEDIQKAQVSGQGDSLHEHIANLAGSPAIKK
GILQTVKVVDELVKVMGRHKPENIVIEMARENQTTQKGQKNSRERMKRI
EEGIKELGSQILKEHPVENTQLQNEKLYLYYLQNGRDMYVDQELDINRL
SDYDVDHIVPQSFLKDDSIDNKVLTRSDKNRGKSDNVPSEEVVKKMKNY
WRQLLNAKLITQRKFDNLTKAERGGLSELDKAGFIKRQLVETRQITKHV
AQILDSRMNTKYDENDKLIREVKVITLKSKLVSDFRKDFQFYKVREINN
YHHAHDAYLNAVVGTALIKKYPKLESEFVYGDYKVYDVRKMIAKSEQEI
GKATAKYFFYSNIMNFFKTEITLANGEIRKRPLIETNGETGEIVWDKGR
DFATVRKVLSMPQVNIVKKTEVQTGGFSKESILPKRNSDKLIARKKDWD
PKKYGGFVSPTVAYSVLVVAKVEKGKSKKLKSVKELLGITIMERSSFEK
NPIDFLEAKGYKEVKKDLIIKLPKYSLFELENGRKRMLASARELQKGNE
LALPSKYVNFLYLASHYEKLKGSPEDNEQKQLFVEQHKHYLDEIIEQIS
EFSKRVILADANLDKVLSAYNKHRDKPIREQAENIIHLFTLTNLGAPAA
FKYFDTTIDRKEYRSTKEVLDATLIHQSITGLYETRIDLSQLGGD
(single underline: HNH domain; double underline:
RuvC domain)
VQR-nCas9 (D10A/D1135V/R1335Q/T1337R) S. pyogenes
Cas9 Nickase
(SEQ ID NO: 822)
MDKKYSIGLAIGTNSVGWAVITDEYKVPSKKFKVLGNTDRHSIKKNLIG
ALLFDSGETAEATRLKRTARRRYTRRKNRICYLQEIFSNEMAKVDDSFF
HRLEESFLVEEDKKHERHPIFGNIVDEVAYHEKYPTIYHLRKKLVDSTD
KADLRLIYLALAHMIKFRGHFLIEGDLNPDNSDVDKLFIQLVQTYNQLF
EENPINASGVDAKAILSARLSKSRRLENLIAQLPGEKKNGLFGNLIALS
LGLTPNFKSNFDLAEDAKLQLSKDTYDDDLDNLLAQIGDQYADLFLAAK
NLSDAILLSDILRVNTEITKAPLSASMIKRYDEHHQDLTLLKALVRQQL
PEKYKEIFFDQSKNGYAGYIDGGASQEEFYKFIKPILEKMDGTEELLVK
LNREDLLRKQRTFDNGSIPHQIHLGELHAILRRQEDFYPFLKDNREKIE
KILTFRIPYYVGPLARGNSRFAWMTRKSEETITPWNFEEVVDKGASAQS
FIERMTNFDKNLPNEKVLPKHSLLYEYFTVYNELTKVKYVTEGMRKPAF
LSGEQKKAIVDLLFKTNRKVTVKQLKEDYFKKIECFDSVEISGVEDRFN
ASLGTYHDLLKIIKDKDFLDNEENEDILEDIVLTLTLFEDREMIEERLK
TYAHLFDDKVMKQLKRRRYTGWGRLSRKLINGIRDKQSGKTILDFLKSD
GFANRNFMQLIHDDSLTFKEDIQKAQVSGQGDSLHEHIANLAGSPAIKK
GILQTVKVVDELVKVMGRHKPENIVIEMARENQTTQKGQKNSRERMKRI
EEGIKELGSQILKEHPVENTQLQNEKLYLYYLQNGRDMYVDQELDINRL
SDYDVDHIVPQSFLKDDSIDNKVLTRSDKNRGKSDNVPSEEVVKKMKNY
WRQLLNAKLITQRKFDNLTKAERGGLSELDKAGFIKRQLVETRQITKHV
AQILDSRMNTKYDENDKLIREVKVITLKSKLVSDFRKDFQFYKVREINN
YHHAHDAYLNAVVGTALIKKYPKLESEFVYGDYKVYDVRKMIAKSEQEI
GKATAKYFFYSNIMNFFKTEITLANGEIRKRPLIETNGETGEIVWDKGR
DFATVRKVLSMPQVNIVKKTEVQTGGFSKESILPKRNSDKLIARKKDWD
PKKYGGFVSPTVAYSVLVVAKVEKGKSKKLKSVKELLGITIMERSSFEK
NPIDFLEAKGYKEVKKDLIIKLPKYSLFELENGRKRMLASAGELQKGNE
LALPSKYVNFLYLASHYEKLKGSPEDNEQKQLFVEQHKHYLDEIIEQIS
EFSKRVILADANLDKVLSAYNKHRDKPIREQAENIIHLFTLTNLGAPAA
FKYFDTTIDRKQYRSTKEVLDATLIHQSITGLYETRIDLSQLGGD
(single underline: HNH domain; double underline:
RuvC domain)
EQR-nCas9 (D10A/D1135E/R1335Q/T1337R) S. pyogenes
Cas9 Nickase
(SEQ ID NO: 823)
MDKKYSIGLAIGTNSVGWAVITDEYKVPSKKFKVLGNTDRHSIKKNLIG
ALLFDSGETAEATRLKRTARRRYTRRKNRICYLQEIFSNEMAKVDDSFF
HRLEESFLVEEDKKHERHPIFGNIVDEVAYHEKYPTIYHLRKKLVDSTD
KADLRLIYLALAHMIKFRGHFLIEGDLNPDNSDVDKLFIQLVQTYNQLF
EENPINASGVDAKAILSARLSKSRRLENLIAQLPGEKKNGLFGNLIALS
LGLTPNFKSNFDLAEDAKLQLSKDTYDDDLDNLLAQIGDQYADLFLAAK
NLSDAILLSDILRVNTEITKAPLSASMIKRYDEHHQDLTLLKALVRQQL
PEKYKEIFFDQSKNGYAGYIDGGASQEEFYKFIKPILEKMDGTEELLVK
LNREDLLRKQRTFDNGSIPHQIHLGELHAILRRQEDFYPFLKDNREKIE
KILTFRIPYYVGPLARGNSRFAWMTRKSEETITPWNFEEVVDKGASAQS
FIERMTNFDKNLPNEKVLPKHSLLYEYFTVYNELTKVKYVTEGMRKPAF
LSGEQKKAIVDLLFKTNRKVTVKQLKEDYFKKIECFDSVEISGVEDRFN
ASLGTYHDLLKIIKDKDFLDNEENEDILEDIVLTLTLFEDREMIEERLK
TYAHLFDDKVMKQLKRRRYTGWGRLSRKLINGIRDKQSGKTILDFLKSD
GFANRNFMQLIHDDSLTFKEDIQKAQVSGQGDSLHEHIANLAGSPAIKK
GILQTVKVVDELVKVMGRHKPENIVIEMARENQTTQKGQKNSRERMKRI
EEGIKELGSQILKEHPVENTQLQNEKLYLYYLQNGRDMYVDQELDINRL
SDYDVDHIVPQSFLKDDSIDNKVLTRSDKNRGKSDNVPSEEVVKKMKNY
WRQLLNAKLITQRKFDNLTKAERGGLSELDKAGFIKRQLVETRQITKHV
AQILDSRMNTKYDENDKLIREVKVITLKSKLVSDFRKDFQFYKVREINN
YHHAHDAYLNAVVGTALIKKYPKLESEFVYGDYKVYDVRKMIAKSEQEI
GKATAKYFFYSNIMNFFKTEITLANGEIRKRPLIETNGETGEIVWDKGR
DFATVRKVLSMPQVNIVKKTEVQTGGFSKESILPKRNSDKLIARKKDWD
PKKYGGFESPTVAYSVLVVAKVEKGKSKKLKSVKELLGITIMERSSFEK
NPIDFLEAKGYKEVKKDLIIKLPKYSLFELENGRKRMLASAGELQKGNE
LALPSKYVNFLYLASHYEKLKGSPEDNEQKQLFVEQHKHYLDEIIEQIS
EFSKRVILADANLDKVLSAYNKHRDKPIREQAENIIHLFTLTNLGAPAA
FKYFDTTIDRKQYRSTKEVLDATLIHQSITGLYETRIDLSQLGGD
(single underline: HNH domain; double underline:
RuvC domain)
KKH-nCas9 (D10A/E782K/N968K/R1015H) S. aureus
Cas9 Nickase
(SEQ ID NO: 268)
MKRNYILGLAIGITSVGYGIIDYETRDVIDAGVRLFKEANVENNEGRRS
KRGARRLKRRRRHRIQRVKKLLFDYNLLTDHSELSGINPYEARVKGLSQ
KLSEEEFSAALLHLAKRRGVHNVNEVEEDTGNELSTKEQISRNSKALEE
KYVAELQLERLKKDGEVRGSINRFKTSDYVKEAKQLLKVQKAYHQLDQS
FIDTYIDLLETRRTYYEGPGEGSPFGWKDIKEWYEMLMGHCTYFPEELR
SVKYAYNADLYNALNDLNNLVITRDENEKLEYYEKFQIIENVFKQKKKP
TLKQIAKEILVNEEDIKGYRVTSTGKPEFTNLKVYHDIKDITARKEIIE
NAELLDQIAKILTIYQSSEDIQEELTNLNSELTQEEIEQISNLKGYTGT
HNLSLKAINLILDELWHTNDNQIAIFNRLKLVPKKVDLSQQKEIPTTLV
DDFILSPVVKRSFIQSIKVINAIIKKYGLPNDIIIELAREKNSKDAQKM
INEMQKRNRQTNERIEEIIRTTGKENAKYLIEKIKLHDMQEGKCLYSLE
AIPLEDLLNNPFNYEVDHIIPRSVSFDNSFNNKVLVKQEENSKKGNRTP
FQYLSSSDSKISYETFKKHILNLAKGKGRISKTKKEYLLEERDINRFSV
QKDFINRNLVDTRYATRGLMNLLRSYFRVNNLDVKVKSINGGFTSFLRR
KWKFKKERNKGYKHHAEDALIIANADFIFKEWKKLDKAKKVMENQMFEE
KQAESMPEIETEQEYKEIFITPHQIKHIKDFKDYKYSHRVDKKPNRKLI
NDTLYSTRKDDKGNTLIVNNLNGLYDKDNDKLKKLINKSPEKLLMYHHD
PQTYQKLKLIMEQYGDEKNPLYKYYEETGNYLTKYSKKDNGPVIKKIKY
YGNKLNAHLDITDDYPNSRNKVVKLSLKPYRFDVYLDNGVYKFVTVKNL
DVIKKENYYEVNSKCYEEAKKLKKISNQAEFIASFYKNDLIKINGELYR
VIGVNNDLLNRIEVNMIDITYREYLENMNDKRPPHIIKTIASKTQSIKK
YSTDILGNLYEVKSKKHPQIIKKG
Streptococcus thermophilus CRISPR1 Cas9 (St1Cas9)
Nickase (D9A)
(SEQ ID NO: 269)
MSDLVLGLAIGIGSVGVGILNKVTGEIIHKNSRIFPAAQAENNLVRRTN
RQGRRLTRRKKHRRVRLNRLFEESGLITDFTKISINLNPYQLRVKGLTD
ELSNEELFIALKNMVKHRGISYLDDASDDGNSSIGDYAQIVKENSKQLE
TKTPGQIQLERYQTYGQLRGDFTVEKDGKKHRLINVFPTSAYRSEALRI
LQTQQEFNPQITDEFINRYLEILTGKRKYYHGPGNEKSRTDYGRYRTSG
ETLDNIFGILIGKCTFYPDEFRAAKASYTAQEFNLLNDLNNLTVPTETK
KLSKEQKNQIINYVKNEKAMGPAKLFKYIAKLLSCDVADIKGYRIDKSG
KAEIHTFEAYRKMKTLETLDIEQMDRETLDKLAYVLTLNTEREGIQEAL
EHEFADGSFSQKQVDELVQFRKANSSIFGKGWHNFSVKLMMELIPELYE
TSEEQMTILTRLGKQKTTSSSNKTKYIDEKLLTEEIYNPVVAKSVRQAI
KIVNAAIKEYGDFDNIVIEMARETNEDDEKKAIQKIQKANKDEKDAAML
KAANQYNGKAELPHSVFHGHKQLATKIRLWHQQGERCLYTGKTISIHDL
INNSNQFEVDHILPLSITFDDSLANKVLVYATANQEKGQRTPYQALDSM
DDAWSFRELKAFVRESKTLSNKKKEYLLTEEDISKFDVRKKFIERNLVD
TRYASRVVLNALQEHFRAHKIDTKVSVVRGQFTSQLRRHWGIEKTRDTY
HHHAVDALIIAASSQLNLWKKQKNTLVSYSEDQLLDIETGELISDDEYK
ESVFKAPYQHFVDTLKSKEFEDSILFSYQVDSKFNRKISDATIYATRQA
KVGKDKADETYVLGKIKDIYTQDGYDAFMKIYKKDKSKFLMYRHDPQTF
EKVIEPILENYPNKQINEKGKEVPCNPFLKYKEEHGYIRKYSKKGNGPE
IKSLKYYDSKLGNHIDITPKDSNNKVVLQSVSPWRADVYFNKTTGKYEI
LGLKYADLQFEKGTGTYKISQEKYNDIKKKEGVDSDSEFKFTLYKNDLL
LVKDTETKEQQLFRFLSRTMPKQKHYVELKPYDKQKFEGGEALIKVLGN
VANSGQCKKGLGKSNISIYKVRTDVLGNQHIIKNEGDKPKLDF
Streptococcus thermophilus CRISPR3Cas9 (St3Cas9)
Nickase (D10A)
(SEQ ID NO: 824)
MTKPYSIGLAIGTNSVGWAVITDNYKVPSKKMKVLGNTSKKYIKKNLLG
VLLFDSGITAEGRRLKRTARRRYTRRRNRILYLQEIFSTEMATLDDAFF
QRLDDSFLVPDDKRDSKYPIFGNLVEEKVYHDEFPTIYHLRKYLADSTK
KADLRLVYLALAHMIKYRGHFLIEGEFNSKNNDIQKNFQDFLDTYNAIF
ESDLSLENSKQLEEIVKDKISKLEKKDRILKLFPGEKNSGIFSEFLKLI
VGNQADFRKCFNLDEKASLHFSKESYDEDLETLLGYIGDDYSDVFLKAK
KLYDAILLSGFLTVTDNETEAPLSSAMIKRYNEHKEDLALLKEYIRNIS
LKTYNEVFKDDTKNGYAGYIDGKTNQEDFYVYLKNLLAEFEGADYFLEK
IDREDFLRKQRTFDNGSIPYQIHLQEMRAILDKQAKFYPFLAKNKERIE
KILTFRIPYYVGPLARGNSDFAWSIRKRNEKITPWNFEDVIDKESSAEA
FINRMTSFDLYLPEEKVLPKHSLLYETFNVYNELTKVRFIAESMRDYQF
LDSKQKKDIVRLYFKDKRKVTDKDIIEYLHAIYGYDGIELKGIEKQFNS
SLSTYHDLLNIINDKEFLDDSSNEAIIEEIIHTLTIFEDREMIKQRLSK
FENIFDKSVLKKLSRRHYTGWGKLSAKLINGIRDEKSGNTILDYLIDDG
ISNRNFMQLIHDDALSFKKKIQKAQIIGDEDKGNIKEVVKSLPGSPAIK
KGILQSIKIVDELVKVMGGRKPESIVVEMARENQYTNQGKSNSQQRLKR
LEKSLKELGSKILKENIPAKLSKIDNNALQNDRLYLYYLQNGKDMYTGD
DLDIDRLSNYDIDHIIPQAFLKDNSIDNKVLVSSASNRGKSDDFPSLEV
VKKRKTFWYQLLKSKLISQRKFDNLTKAERGGLLPEDKAGFIQRQLVET
RQITKHVARLLDEKFNNKKDENNRAVRTVKIITLKSTLVSQFRKDFELY
KVREINDFHHAHDAYLNAVIASALLKKYPKLEPEFVYGDYPKYNSFRER
KSATEKVYFYSNIMNIFKKSISLADGRVIERPLIEVNEETGESVWNKES
DLATVRRVLSYPQVNVVKKVEEQNHGLDRGKPKGLFNANLSSKPKPNSN
ENLVGAKEYLDPKKYGGYAGISNSFAVLVKGTIEKGAKKKITNVLEFQG
ISILDRINYRKDKLNFLLEKGYKDIELIIELPKYSLFELSDGSRRMLAS
ILSTNNKRGEIHKGNQIFLSQKFVKLLYHAKRISNTINENHRKYVENHK
KEFEELFYYILEFNENYVGAKKNGKLLNSAFQSWQNHSIDELCSSFIGP
TGSERKGLFELTSRGSAADFEFLGVKIPRYRDYTPSSLLKDATLIHQSV
TGLYETRIDLAKLGEG

[0228] In some embodiments, the nucleobase editors useful in the present disclosure comprises: (i) a guide nucleotide sequence-programmable DNA-binding protein domain; and (ii) a deaminase domain. In some embodiments, the deaminase domain of the fusion protein is a cytosine deaminase. In some embodiments, the deaminase is an APOBEC1 deaminase. In some embodiments, the deaminase is a rat APOBEC1. In some embodiments, the deaminase is a human APOBEC1. In some embodiments, the deaminase is an APOBEC2 deaminase. In some embodiments, the deaminase is an APOBEC3A deaminase. In some embodiments, the deaminase is an APOBEC3B deaminase. In some embodiments, the deaminase is an APOBEC3C deaminase. In some embodiments, the deaminase is an APOBEC3D deaminase. In some embodiments, is an APOBEC3F deaminase. In some embodiments, the deaminase is an APOBEC3G deaminase. In some embodiments, the deaminase is an APOBEC3H deaminase. In some embodiments, the deaminase is an APOBEC4 deaminase. In some embodiments, the deaminase is an activation-induced deaminase (AID). In some embodiments, the deaminase is a Lamprey CDA1 (pmCDA1). In some embodiments, the deaminase is a human APOBEC3G or a functional fragment thereof. In some embodiments, the deaminase is an APOBEC3G variant comprising mutations correspond to the D316R/D317R mutations in the human APOBEC3G. Exemplary, non-limiting cytosine deaminase sequences that may be used in accordance with the methods of the present disclosure are provided in Example 1 below.

[0229] In some embodiments, the cytosine deaminase is a wild type deaminase or a deaminase as set forth in SEQ ID NOs: 271-292, 303, and 1072-1083. In some embodiments, the cytosine deaminase domains of the fusion proteins provided herein include fragments of deaminases and proteins homologous to a deaminase. For example, in some embodiments, a deaminase domain may comprise a fragment of the amino acid sequence set forth in any of SEQ ID NOs: 271-292, 303, and 1072-1083. In some embodiments, a deaminase domain comprises an amino acid sequence homologous to the amino acid sequence set forth in any of SEQ ID NOs: 271-292, 303, and 1072-1083, or an amino acid sequence homologous to a fragment of the amino acid sequence set forth in any of SEQ ID NOs: 271-292, 303, and 1072-1083. In some embodiments, proteins comprising a deaminase, a fragments of a deaminase, or homologs of a deaminase or a deaminase are referred to as “deaminase variants.” A deaminase variant shares homology to a deaminase, or a fragment thereof. For example a deaminase variant is at least about 70% identical, at least about 80% identical, at least about 90% identical, at least about 95% identical, at least about 96% identical, at least about 97% identical, at least about 98% identical, at least about 99% identical, at least about 99.5% identical, or at least about 99.9% to a wild type deaminase or a deaminase as set forth in any of SEQ ID NOs: 271-292, 303, and 1072-1083. In some embodiments, the deaminase variant comprises a fragment of the deaminase, such that the fragment is at least about 70% identical, at least about 80% identical, at least about 90% identical, at least about 95% identical, at least about 96% identical, at least about 97% identical, at least about 98% identical, at least about 99% identical, at least about 99.5% identical, or at least about 99.9% to the corresponding fragment of wild type deaminase or a deaminase as set forth in any of SEQ ID NOs: 271-292, 303, and 1072-1083. In some embodiments, the cytosine deaminase is at least at least about 70% identical, at least about 80% identical, at least about 90% identical, at least about 95% identical, at least about 96% identical, at least about 97% identical, at least about 98% identical, at least about 99% identical, at least about 99.5% identical, or at least about 99.9% identical to an APOBEC3G variant as set forth in SEQ ID NO: 291 or SEQ ID NO: 292, and comprises mutations corresponding to the D316E/D317R mutations in SEQ ID NO: 290.

[0230] In some embodiments, the cytosine deaminase domain is fused to the N-terminus of the guide nucleotide sequence-programmable DNA-binding protein domain. For example, the fusion protein may have an architecture of NH₂-[cytosine deaminase]-[guide nucleotide sequence-programmable DNA-binding protein domain]-COOH. The “]-[” used in the general architecture above indicates the presence of an optional linker sequence. The term “linker,” as used herein, refers to a chemical group or a molecule linking two molecules or moieties, e.g., two domains of a fusion protein, such as, for example, a dCas9 domain and a cytosine deaminase domain. Typically, the linker is positioned between, or flanked by, two groups, molecules, or other moieties and connected to each one via a covalent bond, thus connecting the two. In some embodiments, the linker is an amino acid or a plurality of amino acids (e.g., a peptide or protein). In some embodiments, the linker is an organic molecule, group, polymer, or chemical moiety. In some embodiments, the linker is 5-100 amino acids in length, for example, 5, 6, 7, 8, 9, 10, 11, 12, 13, 14, 15, 16, 17, 18, 19, 20, 21, 22, 23, 24, 25, 26, 27, 28, 29, 30, 30-35, 35-40, 40-45, 45-50, 50-60, 60-70, 70-80, 80-90, 90-100, 100-150, or 150-200 amino acids in length. Longer or shorter linkers are also contemplated.

[0231] In some embodiments, the cytosine deaminase domain and the Cas9 domain are fused to each other via a linker. Various linker lengths and flexibilities between the deaminase domain (e.g., APOBEC1) and the Cas9 domain can be employed (e.g., ranging from very flexible linkers of the form (GGGS)ₙ (SEQ ID NO: 337), (GGGGS)ₙ (SEQ ID NO: 308), (GGS)ₙ (SEQ ID NO: 784), and (G)ₙ (SEQ ID NO: 783) to more rigid linkers of the form (EAAAK)ₙ (SEQ ID NO: 309), SGSETPGTSESATPES (SEQ ID NO: 310) (see, e.g., Guilinger et al., Nat. Biotechnol. 2014; 32(6): 577-82; the entire contents are incorporated herein by reference), (SGGS)ₙSGSETPGTSESATPES(SGGS)ₙ (SEQ ID NO: 1068), (XP)ₙ (SEQ ID NO: 785), or a combination of any of these, wherein X is any amino acid and n is independently an integer between 1 and 30, in order to achieve the optimal length for deaminase activity for the specific application. In some embodiments, n is independently 1, 2, 3, 4, 5, 6, 7, 8, 9, 10, 11, 12, 13, 14, 15, 16, 17, 18, 19, 20, 21, 22, 23, 24, 25, 26, 27, 28, 29, or 30, or, if more than one linker or more than one linker motif is present, any combination thereof. In some embodiments, the linker comprises a (GGS)ₙ (SEQ ID NO: 784) motif, wherein n is 1, 2, 3, 4, 5, 6, 7, 8, 9, 10, 11, 12, 13, 14 or 15. In some embodiments, the linker comprises a (GGS)ₙ (SEQ ID NO: 784) motif, wherein n is 1, 3, or 7. In some embodiments, the linker comprises the amino acid sequence SGSETPGTSESATPES (SEQ ID NO: 310), also referred to as the XTEN linker. In some embodiments, the linker comprises an amino acid sequence chosen from the group including, but not limited to, AGVF (SEQ ID NO: 825), GFLG (SEQ ID NO: 826), FK, AL, ALAL (SEQ ID NO: 827), or ALALA (SEQ ID NO: 828). In some embodiments, suitable linker motifs and configurations include those described in Chen et al., Fusion protein linkers: property, design and functionality. Adv Drug Deliv Rev. 2013; 65(10):1357-69, which is incorporated herein by reference. In some embodiments, the linker may comprise any of the following amino acid sequences: VPFLLEPDNINGKTC (SEQ ID NO: 311), GSAGSAAGSGEF (SEQ ID NO: 312), SIVAQLSRPDPA (SEQ ID NO: 313), MKIIEQLPSA (SEQ ID NO: 314), VRHKLKRVGS (SEQ ID NO: 315), GHGTGSTGSGSS (SEQ ID NO: 316), MSRPDPA (SEQ ID NO: 317), GSAGSAAGSGEF (SEQ ID NO: 312), SGSETPGTSESA (SEQ ID NO: 318), SGSETPGTSESATPEGGSGGS (SEQ ID NO: 319), or GGSM (SEQ ID NO: 320). Additional suitable linker sequences will be apparent to those of skill in the art based on the instant disclosure.

[0232] In some embodiments, the nucleobase editor comprises a guide nucleotide sequence-programmable DNA-binding protein domain and an apolipoprotein B mRNA-editing complex 1 (APOBEC1) deaminase domain, where the deaminase domain is fused to the N-terminus of the napDNAbp domain via a linker comprising the amino acid sequence SGSETPGTSESATPES (SEQ ID NO: 310). In some embodiments, the a guide nucleotide sequence-programmable DNA-binding protein domain comprises the amino acid sequence of any of the a guide nucleotide sequence-programmable DNA-binding protein domains provided herein. In some embodiments, the deaminase is rat APOBEC1 (SEQ ID NO: 288). In some embodiments, the deaminase is human APOBEC1 (SEQ ID NO: 286). In some embodiments, the deaminase is pmCDA1 (SEQ ID NO: 289). In some embodiments, the deaminase is human APOBEC3G (SEQ ID NO: 279). In some embodiments, the deaminase is a human APOBEC3G variant of any one of (SEQ ID NOs: 290-292). In some embodiments, the fusion protein comprises a guide nucleotide sequence-programmable DNA-binding protein domain and an apolipoprotein B mRNA-editing complex 1 catalytic polypeptide-like 3G (APOBEC3G) deaminase domain, wherein the deaminase domain is fused to the N-terminus of the a guide nucleotide sequence-programmable DNA-binding protein domain domain via a linker of any length or composition (e.g., an amino acid sequence, a peptide, a polymer, or a bond). In some embodiments, the linker comprises the amino acid sequence SGSETPGTSESATPES (SEQ ID NO: 310). In some embodiments, the linker comprises the amino acid sequence (SGGS)₂SGSETPGTSESATPES(SGGS)₂ (SEQ ID NO: 1069).

[0233] In some embodiments, the fusion protein comprises a guide nucleotide sequence-programmable DNA-binding protein domain and a cytidine deaminase 1 (CDA1) deaminase domain, wherein the deaminase domain is fused to the N-terminus of the guide nucleotide sequence-programmable DNA-binding protein domain domain via a linker comprising the amino acid sequence SGSETPGTSESATPES (SEQ ID NO: 310). In some embodiments, the linker comprises the amino acid sequence (SGGS)₂SGSETPGTSESATPES(SGGS)₂ (SEQ ID NO: 1069). In some embodiments, the guide nucleotide sequence-programmable DNA-binding protein domain comprises the amino acid sequence of any of the guide nucleotide sequence-programmable DNA-binding protein domains provided herein.

[0234] In some embodiments, the fusion protein comprises a guide nucleotide sequence-programmable DNA-binding protein and an activation-induced cytidine deaminase (AID) deaminase domain, where the deaminase domain is fused to the N-terminus of the guide nucleotide sequence-programmable DNA-binding protein domain via a linker comprising the amino acid sequence SGSETPGTSESATPES (SEQ ID NO: 310). In some embodiments, the linker comprises the amino acid sequence (SGGS)₂SGSETPGTSESATPES(SGGS)₂ (SEQ ID NO: 1069). In some embodiments, the guide nucleotide sequence-programmable DNA-binding protein comprises the amino acid sequence of any of the guide nucleotide sequence-programmable DNA-binding protein domains provided herein.

[0235] Some aspects of the disclosure are based on the recognition that certain configurations of a guide nucleotide sequence-programmable DNA-binding protein, and a cytidine deaminase domain fused by a linker are useful for efficiently deaminating target cytidine residues. Other aspects of this disclosure relate to the recognition that a nucleobase editing fusion protein with an apolipoprotein B mRNA-editing complex 1 (APOBEC1) deaminase domain fused to the N-terminus of a guide nucleotide sequence-programmable DNA-binding protein via a linker comprising the amino acid sequence SGSETPGTSESATPES (SEQ ID NO: 310) was capable of efficiently deaminating target nucleic acids in a double stranded DNA target molecule. In some embodiments, the fusion protein comprises a guide nucleotide sequence-programmable DNA-binding protein domain and an apolipoprotein B mRNA-editing complex 1 (APOBEC1) deaminase domain, where the deaminase domain is fused to the N-terminus of the napDNAbp via a linker comprising the amino acid sequence SGSETPGTSESATPES (SEQ ID NO: 310). In some embodiments, the fusion protein comprises a guide nucleotide sequence-programmable DNA-binding protein domain and an apolipoprotein B mRNA-editing complex 1 (APOBEC1) deaminase domain, where the deaminase domain is fused to the N-terminus of the napDNAbp via a linker comprising the amino acid sequence SGGS)₂SGSETPGTSESATPES(SGGS)₂ (SEQ ID NO: 1069).

[0236] To successfully edit the desired target C base, the linker between Cas9 and APOBEC may be optimized, as described in Komor et al., Nature, 533, 420-424 (2016), which is incorporated herein by reference. The numbering scheme for base editing is based on the predicted location of the target C within the single stranded stretch of DNA (R-loop) displaced by a programmable guide RNA sequence occurring when a DNA-binding domain (e.g. Cas9, nCas9, dCas9) binds a genomic site (see FIG. 6). Conveniently, the sequence immediately surrounding the target C also matches the sequence of the guide RNA. The numbering scheme for base editing is based on a standard 20-mer programmable sequence, and defines position “21” as the first DNA base of the PAM sequence, resulting in position “1” assigned to the first DNA base matching the 5′-end of the 20-mer programmable guide RNA sequence. Therefore, for all Cas9 variants, position “21” is defined as the first base of the PAM sequence (e.g. NGG, NGAN, NGNG, NGAG, NGCG, NNGRRT, NGRRN, NNNRRT, NNNGATT, NNAGAA, NAAAC). When a longer programmable guide RNA sequence is used (e.g. 21-mer) the 5′-end bases are assigned a decreasing negative number starting at “−1”. For other DNA-binding domains that differ in the position of the PAM sequence, or that require no PAM sequence, the programmable guide RNA sequence is used as a reference for numbering. A 3-aa linker gives a 2-5 base editing window (e.g., positions 2, 3, 4, or 5 relative to the PAM sequence at position 21). A 9-aa linker gives a 3-6 base editing window (e.g., positions 3, 4, 5, or 6 relative to the PAM sequence at position 21). A 16-aa linker (e.g., the SGSETPGTSESATPES (SEQ ID NO: 310) linker) gives a 4-7 base editing window (e.g., positions 4, 5, 6, or 7 relative to the PAM sequence at position 21). A 21-aa linker gives a 5-8 base editing window (e.g., positions 5, 6, 7, 8 relative to the PAM sequence at position 21). Each of these windows can be useful for editing different targeted C bases. For example, the targeted C bases may be at different distances from the adjacent PAM sequence, and by varying the linker length, the precise editing of the desired C base is ensured. One skilled in the art, based on the teachings of CRISPR/Cas9 technology, in particular the teachings of U.S. Provisional Applications 62/245,828, 62/279,346, 62/311,763, 62/322,178, 62/357,352, 62/370,700, and 62/398,490, and in Komor et al., Nature, Programmable editing of a target base in genomic DNA without double-stranded DNA cleavage, 533, 420-424 (2016), each of which is incorporated herein by reference, will be able to determine the window of editing for his/her purpose, and properly design the linker of the cytosine deaminase-dCas9 protein for the precise targeting of the desired C base.

[0237] To successfully edit the desired target C base, appropriate Cas9 domain may be selected to attached to the deaminase domain (e.g., APOBEC1), since different Cas9 domains may lead to different editing windows, as described in in U.S. Pat. No. 9,068,179, US Patent Application Publications US 2015/0166980, US 2015/0166981, US 2015/0166982, US20150166984, and US20150165054, and US Provisional Applications, U.S. Ser. No. 62/245,828, filed Oct. 23, 2015; 62/279,346, filed Jan. 15, 2016; 62/311,763, filed Mar. 22, 2016; 62/322,178, filed Apr. 13, 2016, 62/357,352, filed Jun. 30, 2016, 62/370,700, filed Aug. 3, 2016; 62/398,490, filed Sep. 22, 2016; 62/408,686, filed Oct. 14, 2016; PCT Application PCT/US2016/058344, filed Oct. 22, 2016, U.S. patent application Ser. No. 15/311,852, filed Oct. 22, 2016; and in Komor et al., Nature, Programmable editing of a target base in genomic DNA without double-stranded DNA cleavage, 533, 420-424 (2016), the entire contents of each of which are incorporated herein by reference. For example, APOBEC1-XTEN-SaCas9n-UGI gives a 1-12 base editing window (e.g., positions 1, 2, 3, 4, 5, 6, 7, 8, 9, 10, 11, or 12 relative to the NNNRRT PAM sequence in positions 20-26). One skilled in the art, based on the teachings of CRISPR/Cas9 technology, will be able to determine the editing window for his/her purpose, and properly determine the required Cas9 homolog and linker attached to the cytosine deaminase for the precise targeting of the desired C base.

[0238] In some embodiments, the fusion protein useful in the present disclosure further comprises a uracil glycosylase inhibitor (UGI) domain. A “uracil glycosylase inhibitor” refers to a protein that inhibits the activity of uracil-DNA glycosylase. The C to T base change induced by deamination results in a U:G heteroduplex, which triggers cellular DNA-repair response. Uracil DNA glycosylase (UDG) catalyzes removal of U from DNA in cells and initiates base excision repair, with reversion of the U:G pair to a C:G pair as the most common outcome. Thus, such cellular DNA-repair response may be responsible for the decrease in nucleobase editing efficiency in cells. Uracil DNA Glycosylase Inhibitor (UGI) is known in the art to potently blocks human UDG activity. As described in Komor et al., Nature (2016), fusing a UGI domain to the cytidine deaminase-dCas9 fusion protein reduced the activity of UDG and significantly enhanced editing efficiency.

[0239] Suitable UGI protein and nucleotide sequences are provided herein and additional suitable UGI sequences are known to those in the art, and include, for example, those published in Wang et al., Uracil-DNA glycosylase inhibitor gene of bacteriophage PBS2 encodes a binding protein specific for uracil-DNA glycosylase. J. Biol. Chem. 264:1163-1171(1989); Lundquist et al., Site-directed mutagenesis and characterization of uracil-DNA glycosylase inhibitor protein. Role of specific carboxylic amino acids in complex formation with Escherichia coli uracil-DNA glycosylase. J. Biol. Chem. 272:21408-21419(1997); Ravishankar et al., X-ray analysis of a complex of Escherichia coli uracil DNA glycosylase (EcUDG) with a proteinaceous inhibitor. The structure elucidation of a prokaryotic UDG. Nucleic Acids Res. 26:4880-4887(1998); and Putnam et al., Protein mimicry of DNA from crystal structures of the uracil-DNA glycosylase inhibitor protein and its complex with Escherichia coli uracil-DNA glycosylase. J. Mol. Biol. 287:331-346(1999), each of which is incorporated herein by reference. In some embodiments, the UGI domain comprises the amino acid sequence of SEQ ID NO: 304 without the N-terminal methionine (M). In some embodiments, the UGI comprises the following amino acid sequence:

Bacillus phage PBS2 (Bacteriophage PBS2) Uracil-
DNA glycosylase inhibitor
(SEQ ID NO: 304)
MTNLSDIIEKETGKQLVIQESILMLPEEVEEVIGNKPESDILVHTAYDE
STDENVMLLTSDAPEYKPWALVIQDSNGENKIKML

[0240] In some embodiments, the UGI protein comprises a wild type UGI or a UGI as set forth in SEQ ID NO: 304. In some embodiments, the UGI proteins useful in the present disclosure include fragments of UGI and proteins homologous to a UGI or a UGI fragment. For example, in some embodiments, a UGI comprises a fragment of the amino acid sequence set forth in SEQ ID NO: 304. In some embodiments, a UGI comprises an amino acid sequence homologous to the amino acid sequence set forth in SEQ ID NO: 304 or an amino acid sequence homologous to a fragment of the amino acid sequence set forth in SEQ ID NO: 304. In some embodiments, proteins comprising UGI or fragments of UGI or homologs of UGI or UGI fragments are referred to as “UGI variants.” A UGI variant shares homology to UGI, or a fragment thereof. For example a UGI variant is at least about 70% identical, at least about 80% identical, at least about 90% identical, at least about 95% identical, at least about 96% identical, at least about 97% identical, at least about 98% identical, at least about 99% identical, at least about 99.5% identical, or at least about 99.9% to a wild type UGI or a UGI as set forth in SEQ ID NO: 304. In some embodiments, the UGI variant comprises a fragment of UGI, such that the fragment is at least about 70% identical, at least about 80% identical, at least about 90% identical, at least about 95% identical, at least about 96% identical, at least about 97% identical, at least about 98% identical, at least about 99% identical, at least about 99.5% identical, or at least about 99.9% to the corresponding fragment of wild type UGI or a UGI as set forth in SEQ ID NO: 304.

[0241] It should be appreciated that additional proteins may be uracil glycosylase inhibitors. For example, other proteins that are capable of inhibiting (e.g., sterically blocking) a uracil-DNA glycosylase base-excision repair enzyme are within the scope of this disclosure. In some embodiments, a uracil glycosylase inhibitor is a protein that binds DNA. In some embodiments, a uracil glycosylase inhibitor is a protein that binds single-stranded DNA. For example, a uracil glycosylase inhibitor may be a Erwinia tasmaniensis single-stranded binding protein. In some embodiments, the single-stranded binding protein comprises the amino acid sequence (SEQ ID NO: 305). In some embodiments, a uracil glycosylase inhibitor is a protein that binds uracil. In some embodiments, a uracil glycosylase inhibitor is a protein that binds uracil in DNA. In some embodiments, a uracil glycosylase inhibitor is a catalytically inactive uracil DNA-glycosylase protein. In some embodiments, a uracil glycosylase inhibitor is a catalytically inactive uracil DNA-glycosylase protein that does not excise uracil from the DNA. For example, a uracil glycosylase inhibitor is a UdgX. In some embodiments, the UdgX comprises the amino acid sequence (SEQ ID NO: 306). As another example, a uracil glycosylase inhibitor is a catalytically inactive UDG. In some embodiments, a catalytically inactive UDG comprises the amino acid sequence (SEQ ID NO: 307). It should be appreciated that other uracil glycosylase inhibitors would be apparent to the skilled artisan and are within the scope of this disclosure.

Erwinia tasmaniensis SSB (themostable single-
stranded DNA binding protein)
(SEQ ID NO: 305)
MASRGVNKVILVGNLGQDPEVRYMPNGGAVANITLATSESWRDKQTGET
KEKTEWHRVVLFGKLAEVAGEYLRKGSQVYIEGALQTRKWTDQAGVEKY
TTEVVVNVGGTMQMLGGRSQGGGASAGGQNGGSNNGWGQPQQPQGGNQF
SGGAQQQARPQQQPQQNNAPANNEPPIDFDDDIP
UdgX (binds to Uracil in DNA but does not excise)
(SEQ ID NO: 306)
MAGAQDFVPHTADLAELAAAAGECRGCGLYRDATQAVFGAGGRSARIMM
IGEQPGDKEDLAGLPFVGPAGRLLDRALEAADIDRDALYVTNAVKHFKF
TRAAGGKRRIHKTPSRTEVVACRPWLIAEMTSVEPDVVVLLGATAAKAL
LGNDFRVTQHRGEVLHVDDVPGDPALVATVHPSSLLRGPKEERESAFAG
LVDDLRVAADVRP
UDG (catalytically inactive human UDG, binds to
Uracil in DNA but does not excise)
(SEQ ID NO: 307)
MIGQKTLYSFFSPSPARKRHAPSPEPAVQGTGVAGVPEESGDAAAIPAK
KAPAGQEEPGTPPSSPLSAEQLDRIQRNKAAALLRLAARNVPVGFGESW
KKHLSGEFGKPYFIKLMGFVAEERKHYTVYPPPHQVFTWTQMCDIKDVK
VVILGQEPYHGPNQAHGLCFSVQRPVPPPPSLENIYKELSTDIEDFVHP
GHGDLSGWAKQGVLLLNAVLTVRAHQANSHKERGWEQFTDAVVSWLNQN
SNGLVFLLWGSYAQKKGSAIDRKRHHVLQTAHPSPLSVYRGFFGCRHFS
KTNELLQKSGKKPIDWKEL

[0242] In some embodiments, the UGI domain is fused to the C-terminus of the dCas9 domain in the fusion protein. Thus, the fusion protein would have an architecture of NH₂-[cytosine deaminase]-[guide nucleotide sequence-programmable DNA-binding protein domain]-[UGI]-COOH. In some embodiments, the UGI domain is fused to the N-terminus of the cytosine deaminase domain. As such, the fusion protein would have an architecture of NH₂-[UGI]-[cytosine deaminase]-[guide nucleotide sequence-programmable DNA-binding protein domain]-COOH. In some embodiments, the UGI domain is fused between the guide nucleotide sequence-programmable DNA-binding protein domain and the cytosine deaminase domain. As such, the fusion protein would have an architecture of NH₂-[cytosine deaminase]-[UGI]-[guide nucleotide sequence-programmable DNA-binding protein domain]-COOH. The linker sequences described herein may also be used for the fusion of the UGI domain to the cytosine deaminase-dCas9 fusion proteins.

[0243] In some embodiments, the fusion protein comprises the structure:
[0244] [cytosine deaminase]-[optional linker sequence]-[guide nucleotide sequence-programmable DNA binding protein]-[optional linker sequence]-[UGI];
[0245] [cytosine deaminase]-[optional linker sequence]-[UGI]-[optional linker sequence]-[guide nucleotide sequence-programmable DNA binding protein];
[0246] [UGI]-[optional linker sequence]-[cytosine deaminase]-[optional linker sequence]-[guide nucleotide sequence-programmable DNA binding protein];
[0247] [UGI]-[optional linker sequence]-[guide nucleotide sequence-programmable DNA binding protein]-[optional linker sequence]-[cytosine deaminase];
[0248] [guide nucleotide sequence-programmable DNA binding protein]-[optional linker sequence]-[cytosine deaminase]-[optional linker sequence]-[UGI]; or
[0249] [guide nucleotide sequence-programmable DNA binding protein]-[optional linker sequence]-[UGI]-[optional linker sequence]-[cytosine deaminase].

[0250] In some embodiments, the fusion protein comprises the structure:
[0251] [cytosine deaminase]-[optional linker sequence]-[Cas9 nickase]-[optional linker sequence]-[UGI];
[0252] [cytosine deaminase]-[optional linker sequence]-[UGI]-[optional linker sequence]-[Cas9 nickase];
[0253] [UGI]-[optional linker sequence]-[cytosine deaminase]-[optional linker sequence]-[Cas9 nickase];
[0254] [UGI]-[optional linker sequence]-[Cas9 nickase]-[optional linker sequence]-[cytosine deaminase];
[0255] [Cas9 nickase]-[optional linker sequence]-[cytosine deaminase]-[optional linker sequence]-[UGI]; or
[0256] [Cas9 nickase]-[optional linker sequence]-[UGI]-[optional linker sequence]-[cytosine deaminase].

[0257] In some embodiments, fusion proteins provided herein further comprise a nuclear localization sequence (NLS). In some embodiments, the NLS is fused to the N-terminus of the fusion protein. In some embodiments, the NLS is fused to the C-terminus of the fusion protein. In some embodiments, the NLS is fused to the N-terminus of the UGI protein. In some embodiments, the NLS is fused to the C-terminus of the UGI protein. In some embodiments, the NLS is fused to the N-terminus of the guide nucleotide sequence-programmable DNA-binding protein domain. In some embodiments, the NLS is fused to the C-terminus of the guide nucleotide sequence-programmable DNA-binding protein domain. In some embodiments, the NLS is fused to the N-terminus of the cytosine deaminase. In some embodiments, the NLS is fused to the C-terminus of the deaminase. In some embodiments, the NLS is fused to the fusion protein via one or more linkers. In some embodiments, the NLS is fused to the fusion protein without a linker. Non-limiting, exemplary NLS sequences may be PKKKRKV (SEQ ID NO: 829) or MDSLLMNRRKFLYQFKNVRWAKGRRETYLC (SEQ ID NO: 830).

[0258] In some embodiments, any of the fusion proteins provided herein comprise a second UGI domain. Fusion proteins comprising two UGI domains are described in U.S. Provisional Applications, U.S. Ser. No. 62/475,830, filed Mar. 23, 2017; 62/490,587; 62/511,934, filed May 26, 2017; 62/551,951, filed Aug. 30, 2017; and Komor et al. (2017) Improved Base Excision Repair Inhibition and Bateriophage Mu Gam Protein Yields C:G-to-T:A base editors with higher efficiency and product purity. Sci Adv, 3: eaao4774; the entire contents of which is incorporated herein by reference. In some embodiments, the second UGI domain comprises a wild-type UGI or a UGI as set forth in SEQ ID NO: 304. In some embodiments, the UGI proteins provided herein include fragments of UGI and proteins homologous to a UGI or a UGI fragment. For example, in some embodiments, the second UGI domain comprises a fragment of the amino acid sequence set forth in SEQ ID NO: 304. In some embodiments, a UGI fragment comprises an amino acid sequence that comprises at least 60%, at least 65%, at least 70%, at least 75%, at least 80%, at least 85%, at least 90%, at least 95%, at least 96%, at least 97%, at least 98%, at least 99%, or at least 99.5% of the amino acid sequence as set forth in SEQ ID NO: 304. In some embodiments, the second UGI domain comprises an amino acid sequence homologous to the amino acid sequence set forth in SEQ ID NO: 304 or an amino acid sequence homologous to a fragment of the amino acid sequence set forth in SEQ ID NO: 304. In some embodiments, proteins comprising UGI or fragments of UGI or homologs of UGI or UGI fragments are referred to as “UGI variants.” A UGI variant shares homology to UGI, or a fragment thereof. For example a UGI variant is at least 70% identical, at least 75% identical, at least 80% identical, at least 85% identical, at least 90% identical, at least 95% identical, at least 96% identical, at least 97% identical, at least 98% identical, at least 99% identical, at least 99.5% identical, or at least 99.9% identical to a wild type UGI or a UGI as set forth in SEQ ID NO: 304. In some embodiments, the UGI variant comprises a fragment of UGI, such that the fragment is at least 70% identical, at least 80% identical, at least 90% identical, at least 95% identical, at least 96% identical, at least 97% identical, at least 98% identical, at least 99% identical, at least 99.5% identical, or at least 99.9% to the corresponding fragment of wild-type UGI or a UGI as set forth in SEQ ID NO: 304.

[0259] In some embodiments, the fusion protein comprises the structure:
[0260] [deaminase]-[optional linker sequence]-[dCas9]-[optional linker sequence]-[first UGI]-[optional linker sequence]-[second UGI];
[0261] [deaminase]-[optional linker sequence]-[Cas9 nickase]-[optional linker sequence]-[first UGI]-[optional linker sequence]-[second UGI]; or
[0262] [deaminase]-[optional linker sequence]-[Cas9]-[optional linker sequence]-[first UGI]-[optional linker sequence]-[second UGI].

[0263] In some embodiments, the nucleobase editor comprises a guide nucleotide sequence-programmable DNA-binding protein domain and an apolipoprotein B mRNA-editing complex 1 (APOBEC1) deaminase domain, wherein the deaminase domain is fused to the N-terminus of the guide nucleotide sequence-programmable DNA-binding protein domain via a linker comprising the amino acid sequence (SGGS)₂SGSETPGTSESATPES(SGGS)₂ (SEQ ID NO: 1069). In some embodiments, the a guide nucleotide sequence-programmable DNA-binding protein domain comprises the amino acid sequence of any of the a guide nucleotide sequence-programmable DNA-binding protein domains provided herein. In some embodiments, the deaminase is rat APOBEC1 (SEQ ID NO: 288). In some embodiments, the deaminase is human APOBEC1 (SEQ ID NO: 286). In some embodiments, the deaminase is a human APOBEC3G variant of any one of (SEQ ID NOs: 290-292). In some embodiments, the nucleobase editor comprises a first UGI domain fused to the C-terminus of a guide nucleotide sequence-programmable DNA-binding protein domain via a linker comprising the amino acid sequence (GGS)ₙ (SEQ ID NO: 784), wherein n is 3. In some embodiments, the nucleobase editor comprises a second UGI domain fused to the C-terminus of a first UGI domain via a linker comprising the amino acid sequence (GGS)ₙ(SEQ ID NO: 784), wherein n is 3.

[0264] In some embodiments, the fusion protein comprises the amino acid sequence of SEQ ID NO: 1084. In some embodiments, the fusion protein comprises an amino acid sequence that is at least 70%, at least 75%, at least 80%, at least 85%, at least 90%, at least 95%, at least 96%, at least 97%, at least 98%, at least 99%, or at least 99.5% identical to the amino acid sequence as set forth in SEQ ID NO: 1084.

[0265] In some embodiments, any of the fusion proteins provided herein may further comprise a Gam protein. The term “Gam protein,” as used herein, refers generally to proteins capable of binding to one or more ends of a double strand break of a double stranded nucleic acid (e.g., double stranded DNA). In some embodiments, the Gam protein prevents or inhibits degradation of one or more strands of a nucleic acid at the site of the double strand break. In some embodiments, a Gam protein is a naturally-occurring Gam protein from bacteriophage Mu, or a non-naturally occurring variant thereof. Fusion proteins comprising Gam proteins are described in Komor et al. (2017) Improved Base Excision Repair Inhibition and Bateriophage Mu Gam Protein Yields C:G-to-T:A base editors with higher efficiency and product purity. Sci Adv, 3: eaao4774; the entire contents of which is incorporated by reference herein. In some embodiments, the Gam protein comprises an amino acid sequence that is at least 70%, at least 75%, at least 80%, at least 85%, at least 90%, at least 92%, at least 95%, at least 96%, at least 97%, at least 98%, at least 99%, or at least 99.5% identical to the amino acid sequence provided by SEQ ID NO: 3027. In some embodiments, the Gam protein comprises the amino acid sequence of SEQ ID NO: 3027. In some embodiments, the fusion protein (e.g., BE4-Gam of SEQ ID NO: 3028) comprises a Gam protein, wherein the Cas9 domain of BE4 is replaced with any of the Cas9 domains provided herein.

Gam from bacteriophage Mu:
(SEQ ID NO: 1070)
AKPAKRIKSAAAAYVPQNRDAVITDIKRIGDLQREASRLETEMNDAIAE
ITEKFAARIAPIKTDIETLSKGVQGWCEANRDELTNGGKVKTANLVTGD
VSWRVRPPSVSIRGMDAVMETLERLGLQRFIRTKQEINKEAILLEPKAV
AGVAGITVKSGIEDFSIIPFEQEAGI
BE4-Gam:
(SEQ ID NO: 1071)
MAKPAKRIKSAAAAYVPQNRDAVITDIKRIGDLQREASRLETEMNDAIA
EITEKFAARIAPIKTDIETLSKGVQGWCEANRDELTNGGKVKTANLVTG
DVSWRVRPPSVSIRGMDAVMETLERLGLQRFIRTKQEINKEAILLEPKA
VAGVAGITVKSGIEDFSIIPFEQEAGISGSETPGTSESATPESSSETGP
VAVDPTLRRRIEPHEFEVFFDPRELRKETCLLYEINWGGRHSIWRHTSQ
NTNKHVEVNFIEKFTTERYFCPNTRCSITWFLSWSPCGECSRAITEFLS
RYPHVTLFIYIARLYHHADPRNRQGLRDLISSGVTIQIMTEQESGYCWR
NFVNYSPSNEAHWPRYPHLWVRLYVLELYCIILGLPPCLNILRRKQPQL
TFFTIALQSCHYQRLPPHILWATGLKSGGSSGGSSGSETPGTSESATPE
SSGGSSGGSDKKYSIGLAIGTNSVGWAVITDEYKVPSKKFKVLGNTDRH
SIKKNLIGALLFDSGETAEATRLKRTARRRYTRRKNRICYLQEIFSNEM
AKVDDSFFHRLEESFLVEEDKKHERHPIFGNIVDEVAYHEKYPTIYHLR
KKLVDSTDKADLRLIYLALAHMIKFRGHFLIEGDLNPDNSDVDKLFIQL
VQTYNQLFEENPINASGVDAKAILSARLSKSRRLENLIAQLPGEKKNGL
FGNLIALSLGLTPNFKSNFDLAEDAKLQLSKDTYDDDLDNLLAQIGDQY
ADLFLAAKNLSDAILLSDILRVNTEITKAPLSASMIKRYDEHHQDLTLL
KALVRQQLPEKYKEIFFDQSKNGYAGYIDGGASQEEFYKFIKPILEKMD
GTEELLVKLNREDLLRKQRTFDNGSIPHQIHLGELHAILRRQEDFYPFL
KDNREKIEKILTFRIPYYVGPLARGNSRFAWMTRKSEETITPWNFEEVV
DKGASAQSFIERMTNFDKNLPNEKVLPKHSLLYEYFTVYNELTKVKYVT
EGMRKPAFLSGEQKKAIVDLLFKTNRKVTVKQLKEDYFKKIECFDSVEI
SGVEDRFNASLGTYHDLLKIIKDKDFLDNEENEDILEDIVLTLTLFEDR
EMIEERLKTYAHLFDDKVMKQLKRRRYTGWGRLSRKLINGIRDKQSGKT
ILDFLKSDGFANRNFMQLIHDDSLTFKEDIQKAQVSGQGDSLHEHIANL
AGSPAIKKGILQTVKVVDELVKVMGRHKPENIVIEMARENQTTQKGQKN
SRERMKRIEEGIKELGSQILKEHPVENTQLQNEKLYLYYLQNGRDMYVD
QELDINRLSDYDVDHIVPQSFLKDDSIDNKVLTRSDKNRGKSDNVPSEE
VVKKMKNYWRQLLNAKLITQRKFDNLTKAERGGLSELDKAGFIKRQLVE
TRQITKHVAQILDSRMNTKYDENDKLIREVKVITLKSKLVSDFRKDFQF
YKVREINNYHHAHDAYLNAVVGTALIKKYPKLESEFVYGDYKVYDVRKM
IAKSEQEIGKATAKYFFYSNIMNFFKTEITLANGEIRKRPLIETNGETG
EIVWDKGRDFATVRKVLSMPQVNIVKKTEVQTGGFSKESILPKRNSDKL
IARKKDWDPKKYGGFDSPTVAYSVLVVAKVEKGKSKKLKSVKELLGITI
MERSSFEKNPIDFLEAKGYKEVKKDLIIKLPKYSLFELENGRKRMLASA
GELQKGNELALPSKYVNFLYLASHYEKLKGSPEDNEQKQLFVEQHKHYL
DEIIEQISEFSKRVILADANLDKVLSAYNKHRDKPIREQAENIIHLFTL
TNLGAPAAFKYFDTTIDRKRYTSTKEVLDATLIHQSITGLYETRIDLSQ
LGGDSGGSGGSGGSTNLSDIIEKETGKQLVIQESILMLPEEVEEVIGNK
PESDILVHTAYDESTDENVMLLTSDAPEYKPWALVIQDSNGENKIKMLS
GGSGGSGGSTNLSDIIEKETGKQLVIQESILMLPEEVEEVIGNKPESDI
LVHTAYDESTDENVMLLTSDAPEYKPWALVIQDSNGENKIKMLSGGSPK
KKRK

[0266] Some aspects of the present disclosure provide nucleobase editors associated with a guide nucleotide sequence (e.g., a guide RNA or gRNA). gRNAs can exist as a complex of two or more RNAs, or as a single RNA molecule. gRNAs that exist as a single RNA molecule may be referred to as single-guide RNAs (sgRNAs), though “gRNA” is used interchangeably to refer to guide RNAs that exist as either single molecules or as a complex of two or more molecules. Typically, gRNAs that exist as a single RNA species comprise two domains: (1) a domain that shares homology to a target nucleic acid (e.g., and directs binding of the Cas9 complex to the target); and (2) a domain that binds the Cas9 protein. In some embodiments, domain (2) corresponds to a sequence known as a tracrRNA, and comprises a stem-loop structure. For example, in some embodiments, domain (2) is identical or homologous to a tracrRNA as provided in Jinek et al., Science 337:816-821(2012), which is incorporated herein by reference. Other examples of gRNAs (e.g., those including domain 2) can be found in U.S. Provisional Patent Application, U.S. Ser. No. 61/874,682, filed Sep. 6, 2013, entitled “Switchable Cas9 Nucleases And Uses Thereof,” and U.S. Provisional Patent Application, U.S. Ser. No. 61/874,746, filed Sep. 6, 2013, entitled “Delivery System For Functional Nucleases,” each of which is incorporated herein by reference in their entirety. The gRNA comprises a nucleotide sequence that complements a target site, which mediates binding of the nuclease/RNA complex to said target site, providing the sequence specificity of the nuclease:RNA complex. These proteins are able to be targeted, in principle, to any sequence specified by the guide RNA. Methods of using RNA-programmable nucleases, such as Cas9, for site-specific cleavage (e.g., to modify a genome) are known in the art (see e.g., Cong, L. et al. Science 339, 819-823 (2013); Mali, P. et al. Science 339, 823-826 (2013); Hwang, W. Y. et al. Nature biotechnology 31, 227-229 (2013); Jinek, M. et al. eLife 2, e00471 (2013); Dicarlo, J. E. et al. Nucleic acids research (2013); Jiang, W. et al. Nature Biotechnology 31, 233-239 (2013); each of which are incorporated herein by reference). In particular, examples of guide nucleotide sequences (e.g., sgRNAs) that may be used to target the fusion protein of the present disclosure to its target sequence to deaminate the targeted C bases are described in Komor et al., Nature, 533, 420-424 (2016), which is incorporated herein by reference.

[0267] The specific structure of the guide nucleotide sequences (e.g., sgRNAs) depends on its target sequence and the relative distance of a PAM sequence downstream of the target sequence. One skilled in the art will understand, that no unifying structure of guide nucleotide sequence is given, for that he target sequences are different for each and every C targeted to be deaminated.

[0268] However, the present disclosure provides guidance in how to design the guide nucleotide sequence, e.g., an sgRNA, so that one skilled in the art may use such teaching to a target sequence of interest. An gRNA typically comprises a tracrRNA framework allowing for Cas9 binding, and a guide sequence, which confers sequence specificity to fusion proteins disclosed herein. In some embodiments, the guide RNA comprises a structure 5′-[guide sequence]-tracrRNA-3′. Non-limiting, exemplary tracrRNA sequences are shown in Table 11.

TABLE 11
TracrRNA orthologues and sequences

| | | SEQ |
|---|---|---|
| Organism | tracrRNA sequence | ID NO |
| S. pyogenes | GUUUAAGAGCUAUGCUGGAAAGCCACGGUGAAAAA | 322 |
| | GUUCAACUAUUGCCUGAUCGGAAUAAAUUUGAACG | |
| | AUACGACAGUCGGUGCUUUUUUU | |
| S. pyogenes | GUUUAAGAGCUAGAAAUAGCAAGUUUAAAUAAGGC | 323 |
| | UAGUCCGUUAUCAACUUGAAAAAGUGGCACCGAGU | |
| | CGGUGCUUUUUU | |
| S. thermophilus | GUUUUUGUACUCUCAAGAUUCAAUAAUCUUGCAGA | 324 |
| CRISPR1 | AGCUACAAAGAUAAGGCUUCAUGCCGAAAUCAACA | |
| | CCCUGUCAUUUUAUGGCAGGGUGUUUU | |
| S. thermophilus | GUUUUAGAGCUGUGUUGUUUGUUAAAACAACACAG | 325 |
| CRISPR3 | CGAGUUAAAAUAAGGCUUAGUCCGUACUCAACUUG | |
| | AAAAGGUGGCACCGAUUCGGUGUUUUU | |
| C. jejuni | AAGAAAUUUAAAAAGGGACUAAAAUAAAGAGUUUG | 326 |
| | CGGGACUCUGCGGGGUUACAAUCCCCUAAAACCGC | |
| | UUUU | |
| F. novicida | AUCUAAAAUUAUAAAUGUACCAAAUAAUUAAUGCU | 327 |
| | CUGUAAUCAUUUAAAAGUAUUUUGAACGGACCUCU | |
| | GUUUGACACGUCUGAAUAACUAAAA | |
| S. thermophilus2 | UGUAAGGGACGCCUUACACAGUUACUUAAAUCUUG | 328 |
| | CAGAAGCUACAAAGAUAAGGCUUCAUGCCGAAAUC | |
| | AACACCCUGUCAUUUUAUGGCAGGGUGUUUUCGUU | |
| | AUUU | |
| M. mobile | UGUAUUUCGAAAUACAGAUGUACAGUUAAGAAUAC | 329 |
| | AUAAGAAUGAUACAUCACUAAAAAAAGGCUUUAUG | |
| | CCGUAACUACUACUUAUUUUCAAAAUAAGUAGUUU | |
| | UUUUU | |
| L. innocua | AUUGUUAGUAUUCAAAAUAACAUAGCAAGUUAAAA | 330 |
| | UAAGGCUUUGUCCGUUAUCAACUUUUAAUUAAGUA | |
| | GCGCUGUUUCGGCGCUUUUUUU | |
| S. pyogenes | GUUGGAACCAUUCAAAACAGCAUAGCAAGUUAAAA | 331 |
| | UAAGGCUAGUCCGUUAUCAACUUGAAAAAGUGGCA | |
| | CCGAGUCGGUGCUUUUUUU | |
| S. mutans | GUUGGAAUCAUUCGAAACAACACAGCAAGUUAAAA | 332 |
| | UAAGGCAGUGAUUUUUAAUCCAGUCCGUACACAAC | |
| | UUGAAAAAGUGCGCACCGAUUCGGUGCUUUUUUAU | |
| | UU | |
| S. thermophilus | UUGUGGUUUGAAACCAUUCGAAACAACACAGCGAG | 333 |
| | UUAAAAUAAGGCUUAGUCCGUACUCAACUUGAAAA | |
| | GGUGGCACCGAUUCGGUGUUUUUUUU | |
| N. meningitidis | ACAUAUUGUCGCACUGCGAAAUGAGAACCGUUGCU | 334 |
| | ACAAUAAGGCCGUCUGAAAAGAUGUGCCGCAACGC | |
| | UCUGCCCCUUAAAGCUUCUGCUUUAAGGGGCA | |
| P. multocida | GCAUAUUGUUGCACUGCGAAAUGAGAGACGUUGCU | 335 |
| | ACAAUAAGGCUUCUGAAAAGAAUGACCGUAACGCU | |
| | CUGCCCCUUGUGAUUCUUAAUUGCAAGGGGCAUCG | |
| | UUUUU | |

[0269] The guide sequence of the gRNA comprises a sequence that is complementary to the target sequence. The guide sequence is typically about 20 nucleotides long. For example, the guide sequence may be 15-25 nucleotides long. In some embodiments, the guide sequence is 15, 16, 17, 18, 19, 20, 21, 22, 23, 24, or 25 nucleotides long. In some embodiments, the guide sequence is more than 25 nucleotides long. Such suitable guide RNA sequences typically comprise guide sequences that are complementary to a nucleic sequence within 50 nucleotides upstream or downstream of the target nucleotide to be edited.

[0270] In some embodiments, the guide RNA is about 15-100 nucleotides long and comprises a sequence of at least 10 contiguous nucleotides that is complementary to a target sequence. In some embodiments, the guide RNA is 15, 16, 17, 18, 19, 20, 21, 22, 23, 24, 25, 26, 27, 28, 29, 30, 31, 32, 33, 34, 35, 36, 37, 38, 39, 40, 41, 42, 43, 44, 45, 46, 47, 48, 49, or 50 nucleotides long. In some embodiments, the guide RNA comprises a sequence of 15, 16, 17, 18, 19, 20, 21, 22, 23, 24, 25, 26, 27, 28, 29, 30, 31, 32, 33, 34, 35, 36, 37, 38, 39, or 40 contiguous nucleotides that is complementary to a target sequence.

### Compositions

[0271] Some aspects of the present disclosure relate to compositions that may be used for generating cancer vaccines in vivo or ex vivo. In some embodiments, the composition comprises: (i) a nucleobase editor or a nucleic acid molecule encoding the nucleobase editor described herein; and (ii) a guide nucleotide sequence targeting the nucleobase editor to a tumor specific antigen-encoding polynucleotide. The guide nucleotide sequence that may be used to generate heteroclitic or cryptic epitopes may be selected from SEQ ID NOs: X-X. Guide nucleotide sequences for generating specific heteroclitic or cryptic epitopes may be found in Tables 5 and 6.

[0272] In some embodiments, the composition described herein further comprises a pharmaceutically acceptable carrier.

[0273] As used here, the term “pharmaceutically-acceptable carrier” means a pharmaceutically-acceptable material, composition or vehicle, such as a liquid or solid filler, diluent, excipient, manufacturing aid (e.g., lubricant, talc magnesium, calcium or zinc stearate, or steric acid), or solvent encapsulating material, involved in carrying or transporting the compound from one site (e.g., the delivery site) of the body, to another site (e.g., organ, tissue or portion of the body). A pharmaceutically acceptable carrier is “acceptable” in the sense of being compatible with the other ingredients of the formulation and not injurious to the tissue of the subject (e.g., physiologically compatible, sterile, physiologic pH, etc.). Some examples of materials which can serve as pharmaceutically-acceptable carriers include: (1) sugars, such as lactose, glucose and sucrose; (2) starches, such as corn starch and potato starch; (3) cellulose, and its derivatives, such as sodium carboxymethyl cellulose, methylcellulose, ethyl cellulose, microcrystalline cellulose and cellulose acetate; (4) powdered tragacanth; (5) malt; (6) gelatin; (7) lubricating agents, such as magnesium stearate, sodium lauryl sulfate and talc; (8) excipients, such as cocoa butter and suppository waxes; (9) oils, such as peanut oil, cottonseed oil, safflower oil, sesame oil, olive oil, corn oil and soybean oil; (10) glycols, such as propylene glycol; (11) polyols, such as glycerin, sorbitol, mannitol and polyethylene glycol (PEG); (12) esters, such as ethyl oleate and ethyl laurate; (13) agar; (14) buffering agents, such as magnesium hydroxide and aluminum hydroxide; (15) alginic acid; (16) pyrogen-free water; (17) isotonic saline; (18) Ringer's solution; (19) ethyl alcohol; (20) pH buffered solutions; (21) polyesters, polycarbonates and/or polyanhydrides; (22) bulking agents, such as polypeptides and amino acids (23) serum component, such as serum albumin, HDL and LDL; (22) C2-C12 alcohols, such as ethanol; and (23) other non-toxic compatible substances employed in pharmaceutical formulations. Wetting agents, coloring agents, release agents, coating agents, sweetening agents, flavoring agents, perfuming agents, preservative and antioxidants can also be present in the formulation. The terms such as “excipient”, “carrier”, “pharmaceutically acceptable carrier” or the like are used interchangeably herein.

[0274] In some embodiments, the nucleobase editors and the guide nucleotides of the present disclosure in a composition is administered by injection, by means of a catheter, by means of a suppository, or by means of an implant, the implant being of a porous, non-porous, or gelatinous material, including a membrane, such as a sialastic membrane, or a fiber. In some embodiments, the injection is directed to the liver.

[0275] In other embodiments, the nucleobase editors and the guide nucleotides are delivered in a controlled release system. In one embodiment, a pump may be used (see, e.g., Langer, 1990, Science 249:1527-1533; Sefton, 1989, CRC Crit. Ref Biomed. Eng. 14:201; Buchwald et al., 1980, Surgery 88:507; Saudek et al., 1989, N. Engl. J. Med. 321:574). In another embodiment, polymeric materials can be used. (See, e.g., Medical Applications of Controlled Release (Langer and Wise eds., CRC Press, Boca Raton, Fla., 1974); Controlled Drug Bioavailability, Drug Product Design and Performance (Smolen and Ball eds., Wiley, New York, 1984); Ranger and Peppas, 1983, Macromol. Sci. Rev. Macromol. Chem. 23:61. See also Levy et al., 1985, Science 228:190; During et al., 1989, Ann. Neurol. 25:351; Howard et al., 1989, J. Neurosurg. 71:105.) Other controlled release systems are discussed, for example, in Langer, supra.

[0276] In typical embodiments, the pharmaceutical composition is formulated in accordance with routine procedures as a pharmaceutical composition adapted for intravenous or subcutaneous administration to a subject, e.g., a human. Typically, compositions for administration by injection are solutions in sterile isotonic aqueous buffer. Where necessary, the pharmaceutical can also include a solubilizing agent and a local anesthetic such as lignocaine to ease pain at the site of the injection. Generally, the ingredients are supplied either separately or mixed together in unit dosage form, for example, as a dry lyophilized powder or water free concentrate in a hermetically sealed container such as an ampoule or sachette indicating the quantity of active agent. Where the pharmaceutical is to be administered by infusion, it can be dispensed with an infusion bottle containing sterile pharmaceutical grade water or saline. Where the pharmaceutical is administered by injection, an ampoule of sterile water for injection or saline can be provided so that the ingredients can be mixed prior to administration.

[0277] A pharmaceutical composition for systemic administration may be a liquid, e.g., sterile saline, lactated Ringer's or Hank's solution. In addition, the pharmaceutical composition can be in solid forms and re-dissolved or suspended immediately prior to use. Lyophilized forms are also contemplated.

[0278] The pharmaceutical composition can be contained within a lipid particle or vesicle, such as a liposome or microcrystal, which is also suitable for parenteral administration. The particles can be of any suitable structure, such as unilamellar or plurilamellar, so long as compositions are contained therein. Compounds can be entrapped in ‘stabilized plasmid-lipid particles’ (SPLP) containing the fusogenic lipid dioleoylphosphatidylethanolamine (DOPE), low levels (5-10 mol %) of cationic lipid, and stabilized by a polyethyleneglycol (PEG) coating (Zhang Y. P. et al., Gene Ther. 1999, 6:1438-47). Positively charged lipids such as N-[1-(2,3-dioleoyloxi)propyl]-N,N,N-trimethyl-amoniummethylsulfate, or “DOTAP,” are particularly preferred for such particles and vesicles. The preparation of such lipid particles is well known. See, e.g., U.S. Pat. Nos. 4,880,635; 4,906,477; 4,911,928; 4,917,951; 4,920,016; and 4,921,757.

[0279] The pharmaceutical compositions of this disclosure may be administered or packaged as a unit dose, for example. The term “unit dose” when used in reference to a pharmaceutical composition of the present disclosure refers to physically discrete units suitable as unitary dosage for the subject, each unit containing a predetermined quantity of active material calculated to produce the desired therapeutic effect in association with the required diluent; i.e., carrier, or vehicle.

[0280] In some embodiments, the nucleobase editors or the guide nucleotides described herein may be conjugated to a therapeutic moiety, e.g., an anti-inflammatory agent. Techniques for conjugating such therapeutic moieties to polypeptides, including e.g., Fc domains, are well known; see, e.g., Amon et al., “Monoclonal Antibodies For Immunotargeting Of Drugs In Cancer Therapy”, in Monoclonal Antibodies And Cancer Therapy, Reisfeld et al. (eds.), 1985, pp. 243-56, Alan R. Liss, Inc.); Hellstrom et al., “Antibodies For Drug Delivery”, in Controlled Drug Delivery (2nd Ed.), Robinson et al. (eds.), 1987, pp. 623-53, Marcel Dekker, Inc.); Thorpe, “Antibody Carriers Of Cytotoxic Agents In Cancer Therapy: A Review”, in Monoclonal Antibodies '84: Biological And Clinical Applications, Pinchera et al. (eds.), 1985, pp. 475-506); “Analysis, Results, And Future Prospective Of The Therapeutic Use Of Radiolabeled Antibody In Cancer Therapy”, in Monoclonal Antibodies For Cancer Detection And Therapy, Baldwin et al. (eds.), 1985, pp. 303-16, Academic Press; and Thorpe et al. (1982) “The Preparation And Cytotoxic Properties Of Antibody-Toxin Conjugates,” Immunol. Rev., 62:119-158.

[0281] Further, the compositions of the present disclosure may be assembled into kits. In some embodiments, the kit comprises nucleic acid vectors for the expression of the nucleobase editors described herein. In some embodiments, the kit further comprises appropriate guide nucleotide sequences (e.g., gRNAs) or nucleic acid vectors for the expression of such guide nucleotide sequences, to target the nucleobase editors to the desired target sequences.

[0282] The kit described herein may include one or more containers housing components for performing the methods described herein and optionally instructions of uses. Any of the kit described herein may further comprise components needed for performing the assay methods. Each component of the kits, where applicable, may be provided in liquid form (e.g., in solution), or in solid form, (e.g., a dry powder). In certain cases, some of the components may be reconstitutable or otherwise processible (e.g., to an active form), for example, by the addition of a suitable solvent or other species (for example, water or certain organic solvents), which may or may not be provided with the kit.

[0283] In some embodiments, the kits may optionally include instructions and/or promotion for use of the components provided. As used herein, “instructions” can define a component of instruction and/or promotion, and typically involve written instructions on or associated with packaging of the disclosure. Instructions also can include any oral or electronic instructions provided in any manner such that a user will clearly recognize that the instructions are to be associated with the kit, for example, audiovisual (e.g., videotape, DVD, etc.), Internet, and/or web-based communications, etc. The written instructions may be in a form prescribed by a governmental agency regulating the manufacture, use, or sale of pharmaceuticals or biological products, which can also reflect approval by the agency of manufacture, use or sale for animal administration. As used herein, “promoted” includes all methods of doing business including methods of education, hospital and other clinical instruction, scientific inquiry, drug discovery or development, academic research, pharmaceutical industry activity including pharmaceutical sales, and any advertising or other promotional activity including written, oral and electronic communication of any form, associated with the disclosure. Additionally, the kits may include other components depending on the specific application, as described herein.

[0284] The kits may contain any one or more of the components described herein in one or more containers. The components may be prepared sterilely, packaged in a syringe and shipped refrigerated. Alternatively it may be housed in a vial or other container for storage. A second container may have other components prepared sterilely. Alternatively the kits may include the active agents premixed and shipped in a vial, tube, or other container.

[0285] The kits may have a variety of forms, such as a blister pouch, a shrink wrapped pouch, a vacuum sealable pouch, a sealable thermoformed tray, or a similar pouch or tray form, with the accessories loosely packed within the pouch, one or more tubes, containers, a box or a bag. The kits may be sterilized after the accessories are added, thereby allowing the individual accessories in the container to be otherwise unwrapped. The kits can be sterilized using any appropriate sterilization techniques, such as radiation sterilization, heat sterilization, or other sterilization methods known in the art. The kits may also include other components, depending on the specific application, for example, containers, cell media, salts, buffers, reagents, syringes, needles, a fabric, such as gauze, for applying or removing a disinfecting agent, disposable gloves, a support for the agents prior to administration, etc.

### Therapeutics

[0286] The compositions or cancer vaccines (e.g., a whole-cell vaccine comprising a modified tumor cell) described herein may be administered to a subject in need thereof, in a therapeutically effective amount, to treat cancer. The compositions and cancer vaccines described herein induce tumor-specific adaptive responses. It is known that cancer cells exploit immune checkpoints to evade immune surveillance. Thus, in some embodiments, in addition to the compositions or cancer vaccines described herein, agents that modulate the activities of immune checkpoints are also administered to boost the tumor-specific immune response elicited by the cancer vaccines.

[0287] In some embodiments, the agents that modulate the activities of immune checkpoints are immune checkpoint inhibitors. “Immune checkpoints” are proteins in the immune system that either enhance an immune response signal (co-stimulatory molecules) or reduce an immune response signal. Many cancers protect themselves from the immune system by exploiting the inhibitory immune checkpoint proteins to inhibit the T cell signal. Such inhibitory checkpoint proteins include, without limitation, Cytotoxic T-Lymphocyte-Associated protein 4 (CTLA-4), Programmed Death 1 receptor (PD-1), T-cell Immunoglobulin domain and Mucin domain 3 (TIM3), Lymphocyte Activation Gene-3 (LAG3), V-set domain-containing T-cell activation inhibitor 1 (VTVN1 or B7-H4), Cluster of Differentiation 276 (CD276 or B7-H3), B and T Lymphocyte Attenuator (BTLA), Galectin-9 (GALS), Checkpoint kinase 1 (Chk1), Adenosine A2A receptor (A2aR), Indoleamine 2,3-dioxygenase (IDO), Killer-cell Immunoglobulin-like Receptor (KIR), Lymphocyte Activation Gene-3 (LAG3), and V-domain Ig suppressor of T cell activation (VISTA).

[0288] Some of these immune checkpoint proteins need their cognate binding partners, or ligands, for their immune inhibitory activity. For example, A2AR is the receptor of adenosine A2A and binding of A2A to A2AR activates a negative immune feedback loop. As another example, PD-1 associates with its two ligands, PD-L1 and PD-L2, to down regulate the immune system by preventing the activation of T-cells. PD-1 promotes the programmed cell death of antigen specific T-cells in lymph nodes and simultaneously reduces programmed cell death of suppressor T cells, thus achieving its immune inhibitory function. As yet another example, CTLA4 is present on the surface of T cells, and when bound to its binding partner CD80 or CD86 on the surface of antigen-present cells (APCs), it transmits an inhibitory signal to T cells, thereby reducing the immune response.

[0289] Cancer cells are known to exploit the immune checkpoint proteins to escape being attacked by the immune system. Therefore, the use of immune checkpoint inhibitors to enhance an immune response against cancer, and thus treating cancer, have been described. The immunotherapeutic agents in the compositions of the present disclosure may also be immune checkpoint inhibitors. In some embodiments, the immune checkpoint inhibits any one or more of Cytotoxic T-Lymphocyte-Associated protein 4 (CTLA-4), Programmed Death 1 receptor (PD-1), T-cell Immunoglobulin domain and Mucin domain 3 (TIM3), Lymphocyte Activation Gene-3 (LAG3), V-set domain-containing T-cell activation inhibitor 1 (VTVN1 or B7-H4), Cluster of Differentiation 276 (CD276 or B7-H3), B and T Lymphocyte Attenuator (BTLA), Galectin-9 (GAL9), Checkpoint kinase 1 (Chk1), Adenosine A2A receptor (A2aR), Indoleamine 2,3-dioxygenase (IDO), Killer-cell Immunoglobulin-like Receptor (KIR), Lymphocyte Activation Gene-3 (LAG3) and V-domain Ig suppressor of T cell activation (VISTA).

[0290] An “immune checkpoint inhibitor” is a molecule that prevents or weakens the activity of an immune checkpoint inhibitor, For example, an immune checkpoint inhibitor may inhibit the binding of the immune checkpoint protein to its cognate binding partner, e.g., PD-1, CTLA-4, or A2aR. In some embodiments, the immune checkpoint inhibitor is a small molecule. In some embodiments, the immune checkpoint inhibitors is a nucleic acid aptamer (e.g., a siRNA targeting any one of the immune checkpoint proteins). In some embodiments, the immune checkpoint inhibitor is a recombinant protein. In some embodiments, the immune checkpoint inhibitor is an antibody. In some embodiments, the antibody comprises an anti-CTLA-4, anti-PD-1, anti-PD-L1, anti-TIM3, anti-LAG3, anti-B7-H3, anti-B7-H4, anti-BTLA, anti-GAL9, anti-Chk, anti-A2aR, anti-IDO, anti-KIR, anti-LAG3, anti-VISTA antibody, or a combination of any two or more of the foregoing antibodies. In some embodiments, the immune checkpoint inhibitor is a monoclonal antibody. In some embodiments, the immune checkpoint inhibitor comprises anti-PD1, anti-PD-L1, anti-CTLA-4, or a combination of any two or more of the foregoing antibodies. For example, the anti-PD-1 antibody is pembrolizumab (Keytruda®) or nivolumab (Opdivo®) and the anti-CTLA-4 antibody is ipilimumab (Yervoy®). Thus, in some embodiments, the immune checkpoint inhibitor comprises pembrolizumab, nivolumab, ipilimumab, or any combination of two or more of the foregoing antibodies. The examples described herein are not meant to be limiting and that any immune checkpoint inhibitors known in the art and any combinations thereof may be used in accordance with the present disclosure.

[0291] In some embodiments, the immune checkpoint may be inhibited by disrupting any one of the immune checkpoint genes (e.g., CTLA-4, PD-1, PD-L1, TIM3, LAG3, B7-H3, B7-H4, BTLA, GAL9, Chk1, or A2aR) using any of the gene editing methods known in the art (e.g., CRISPR/Cas9 mediated cleavage of any of the genes).

[0292] In some embodiments, an adjuvant is futher administered to the subject. Adjuvants are substances which enhance the immune response when administered together with an immunogen or antigen. Adjuvants are thought to function in several ways, including by increasing the surface area of antigen, prolonging the retention of the antigen in the body thus allowing time for the lymphoid system to have access to the antigen, slowing the release of antigen, targeting antigen to macrophages, activating macrophages, or otherwise eliciting non-specific activation of the cells of the immune system see, e.g., H. S. Warren et al, Annu. Rev. immunol., 4:369 (1986). Currently, an essential role of adjuvants in vaccines is to direct CD4+ T cell subset differentiation, although how adjuvants perform this function is poorly understood.

[0293] The ability of a adjuvant to induce and increase a specific type of immune response and the identification of that ability is thus a key factor in the selection of particular adjuvants for vaccine use against a particular pathogen. Typical adjuvants include water and oil emulsions, e.g., Freund's adjuvant, and chemical compounds such as aluminum hydroxide or alum. At present, alum is the only adjuvant approved in the United States for human vaccines; it has been determined that alum induces the production of TH 2 cells.

[0294] Many of the most effective adjuvants include bacteria or their products, e.g., microorganisms such as the attenuated strain of Mycobacterium bovis, bacillus Calmette-Guerin (BCG); microorganism components, e.g., alum-precipitated diphtheria toxoid, bacterial lipopolysaccharide and endotoxins. However, the role that the bacteria play is ill-defined. Recently, it has been noted that many bacteria or their products, lipopolysaccharide, Staphylococcus aureus, Mycobacterium tuberculosis, and C. parvum, stimulate IL-12 production by macrophages A. D'Andrea et al, J. Exp. Med., 176:1387 (1992).

[0295] Cancers or tumors include but are not limited to neoplasms, malignant tumors, metastases, or any disease or disorder characterized by uncontrolled cell growth such that it would be considered cancerous. The cancer may be a primary or metastatic cancer. Cancers include, but are not limited to, biliary tract cancer; bladder cancer; brain cancer including glioblastomas and medulloblastomas; breast cancer; cervical cancer; choriocarcinoma; colon cancer; endometrial cancer; esophageal cancer; gastric cancer; hematological neoplasms including acute lymphocytic and myelogenous leukemia; multiple myeloma; AIDS-associated leukemias and adult T-cell leukemia lymphoma; intraepithelial neoplasms including Bowen's disease and Paget's disease; liver cancer; lung cancer; lymphomas including Hodgkin's disease and lymphocytic lymphomas; neuroblastomas; oral cancer including squamous cell carcinoma; ovarian cancer including those arising from epithelial cells, stromal cells, germ cells and mesenchymal cells; pancreatic cancer; prostate cancer; rectal cancer; sarcomas including leiomyosarcoma, rhabdomyosarcoma, liposarcoma, fibrosarcoma, and osteosarcoma; skin cancer including melanoma, Kaposi's sarcoma, basocellular cancer, and squamous cell cancer; testicular cancer including germinal tumors such as seminoma, non-seminoma, teratomas, choriocarcinomas; stromal tumors and germ cell tumors; thyroid cancer including thyroid adenocarcinoma and medullar carcinoma; and renal cancer including adenocarcinoma and Wilms' tumor. Commonly encountered cancers include breast, prostate, lung, ovarian, colorectal, and brain cancer.

[0296] “A therapeutically effective amount” as used herein refers to the amount of each base-editing agent of the present disclosure required to confer therapeutic effect on the subject, either alone or in combination with one or more other therapeutic agents. Effective amounts vary, as recognized by those skilled in the art, depending on the particular condition being treated, the severity of the condition, the individual subject parameters including age, physical condition, size, gender and weight, the duration of the treatment, the nature of concurrent therapy (if any), the specific route of administration and like factors within the knowledge and expertise of the health practitioner. These factors are well known to those of ordinary skill in the art and can be addressed with no more than routine experimentation. It is generally preferred that a maximum dose of the individual components or combinations thereof be used, that is, the highest safe dose according to sound medical judgment. It will be understood by those of ordinary skill in the art, however, that a subject may insist upon a lower dose or tolerable dose for medical reasons, psychological reasons or for virtually any other reasons. Empirical considerations, such as the half-life, generally will contribute to the determination of the dosage. For example, therapeutic agents that are compatible with the human immune system, such as polypeptides comprising regions from humanized antibodies or fully human antibodies, may be used to prolong the half-life of the polypeptide.

[0297] Frequency of administration may be determined and adjusted over the course of therapy, and is generally, but not necessarily, based on treatment and/or suppression and/or amelioration and/or delay of a disease. Alternatively, sustained continuous release formulations of a polypeptide or a polynucleotide may be appropriate. Various formulations and devices for achieving sustained release are known in the art. In some embodiments, dosage is daily, every other day, every three days, every four days, every five days, or every six days. In some embodiments, dosing frequency is once every week, every 2 weeks, every 4 weeks, every 5 weeks, every 6 weeks, every 7 weeks, every 8 weeks, every 9 weeks, or every 10 weeks; or once every month, every 2 months, or every 3 months, or longer. The progress of this therapy is easily monitored by conventional techniques and assays.

[0298] The dosing regimen (including the polypeptide used) can vary over time. In some embodiments, for an adult subject of normal weight, doses ranging from about 0.01 to 1000 mg/kg may be administered. In some embodiments, the dose is between 1 to 200 mg. The particular dosage regimen, i.e., dose, timing and repetition, will depend on the particular subject and that subject's medical history, as well as the properties of the polypeptide or the polynucleotide (such as the half-life of the polypeptide or the polynucleotide, and other considerations well known in the art).

[0299] For the purpose of the present disclosure, the appropriate dosage of a therapeutic agent as described herein will depend on the specific agent (or compositions thereof) employed, the formulation and route of administration, the type and severity of the disease, whether the polypeptide or the polynucleotide is administered for preventive or therapeutic purposes, previous therapy, the subject's clinical history and response to the antagonist, and the discretion of the attending physician. Typically the clinician will administer a polypeptide until a dosage is reached that achieves the desired result.

[0300] Administration of one or more agents can be continuous or intermittent, depending, for example, upon the recipient's physiological condition, whether the purpose of the administration is therapeutic or prophylactic, and other factors known to skilled practitioners. The administration of an agent (e.g., cancer vaccine) may be essentially continuous over a preselected period of time or may be in a series of spaced dose, e.g., either before, during, or after developing a disease. “Treat,” as used herein, means to cure, heal, alleviate, relieve, alter, remedy, ameliorate, improve, or affect the disease, the symptom of the disease, or the predisposition toward the disease. “Treating,” as used herein refers to the application or administration of a composition or a cancer vaccine described herein to a subject in need thereof.

[0301] “A subject in need thereof”, refers to an individual who has a disease, a symptom of the disease, or a predisposition toward the disease. In some embodiments, the subject is a mammal. In some embodiments, the subject is a non-human primate. In some embodiments, the subject is human. Alleviating a disease includes delaying the development or progression of the disease, or reducing disease severity. Alleviating the disease does not necessarily require curative results.

[0302] As used therein, “delaying” the development of a disease means to defer, hinder, slow, retard, stabilize, and/or postpone progression of the disease. This delay can be of varying lengths of time, depending on the history of the disease and/or individuals being treated. A method that “delays” or alleviates the development of a disease, or delays the onset of the disease, is a method that reduces probability of developing one or more symptoms of the disease in a given time frame and/or reduces extent of the symptoms in a given time frame, when compared to not using the method. Such comparisons are typically based on clinical studies, using a number of subjects sufficient to give a statistically significant result.

[0303] “Development” or “progression” of a disease means initial manifestations and/or ensuing progression of the disease. Development of the disease can be detectable and assessed using standard clinical techniques as well known in the art. However, development also refers to progression that may be undetectable. For purpose of this disclosure, development or progression refers to the biological course of the symptoms. “Development” includes occurrence, recurrence, and onset.

[0304] As used herein “onset” or “occurrence” of a disease includes initial onset and/or recurrence. Conventional methods, known to those of ordinary skill in the art of medicine, can be used to administer the isolated polypeptide or pharmaceutical composition to the subject, depending upon the type of disease to be treated or the site of the disease. This composition can also be administered via other conventional routes, e.g., administered orally, parenterally, by inhalation spray, topically, rectally, nasally, buccally, vaginally or via an implanted reservoir.

[0305] The term “parenteral” as used herein includes subcutaneous, intracutaneous, intravenous, intramuscular, intraarticular, intraarterial, intrasynovial, intrasternal, intrathecal, intralesional, and intracranial injection or infusion techniques. In addition, it can be administered to the subject via injectable depot routes of administration such as using 1-, 3-, or 6-month depot injectable or biodegradable materials and methods.

[0306] Without further elaboration, it is believed that one skilled in the art can, based on the above description, utilize the present disclosure to its fullest extent. The following specific embodiments are, therefore, to be construed as merely illustrative, and not limitative of the remainder of the disclosure in any way whatsoever. All publications cited herein are incorporated by reference for the purposes or subject matter referenced herein.

### EXAMPLES

[0307] In order that the disclosure described herein may be more fully understood, the following examples are set forth. The synthetic examples described in this application are offered to illustrate the compounds and methods provided herein and are not to be construed in any way as limiting their scope.

### Example 1: Guide Nucleotide Sequence Programmable DNA-Binding Protein Domains, Deaminases, and Base Editors

[0308] Non-limiting examples of suitable guide nucleotide sequence-programmable DNA-binding protein domain s are provided. The disclosure provides Cas9 variants, for example, Cas9 proteins from one or more organisms, which may comprise one or more mutations (e.g., to generate dCas9 or Cas9 nickase). In some embodiments, one or more of the amino acid residues, identified below by an asterek, of a Cas9 protein may be mutated. In some embodiments, the D10 and/or H840 residues of the amino acid sequence provided in SEQ ID NO: 1, or a corresponding mutation in any of the amino acid sequences provided in SEQ ID NOs: 11-260, are mutated. In some embodiments, the D10 residue of the amino acid sequence provided in SEQ ID NO: 1, or a corresponding mutation in any of the amino acid sequences provided in SEQ ID NOs: 11-260, is mutated to any amino acid residue, except for D. In some embodiments, the D10 residue of the amino acid sequence provided in SEQ ID NO: 1, or a corresponding mutation in any of the amino acid sequences provided in SEQ ID NOs: 11-260, is mutated to an A. In some embodiments, the H840 residue of the amino acid sequence provided in SEQ ID NO: 1, or a corresponding residue in any of the amino acid sequences provided in SEQ ID NOs: 11-260, is an H. In some embodiments, the H840 residue of the amino acid sequence provided in SEQ ID NO: 1, or a corresponding mutation in any of the amino acid sequences provided in SEQ ID NOs: 11-260, is mutated to any amino acid residue, except for H. In some embodiments, the H840 residue of the amino acid sequence provided in SEQ ID NO: 1, or a corresponding mutation in any of the amino acid sequences provided in SEQ ID NOs: 11-260, is mutated to an A. In some embodiments, the D10 residue of the amino acid sequence provided in SEQ ID NO: 1, or a corresponding residue in any of the amino acid sequences provided in SEQ ID NOs: 11-260, is a D.

[0309] A number of Cas9 sequences from various species were aligned to determine whether corresponding homologous amino acid residues of D10 and H840 of SEQ ID NO: 1 or SEQ ID NO: 11 can be identified in other Cas9 proteins, allowing the generation of Cas9 variants with corresponding mutations of the homologous amino acid residues. The alignment was carried out using the NCBI Constraint-based Multiple Alignment Tool (COBALT (accessible at st-va.ncbi.nlm.nih.gov/tools/cobalt), with the following parameters. Alignment parameters: Gap penalties −11,−1; End-Gap penalties −5,−1. CDD Parameters: Use RPS BLAST on; Blast E-value 0.003; Find Conserved columns and Recompute on. Query Clustering Parameters: Use query clusters on; Word Size 4; Max cluster distance 0.8; Alphabet Regular.

[0310] An exemplary alignment of four Cas9 sequences is provided below. The Cas9 sequences in the alignment are: Sequence 1 (S1): SEQ ID NO: 11|WP_010922251|gi 499224711|type II CRISPR RNA-guided endonuclease Cas9 [Streptococcus pyogenes]; Sequence 2 (S2): SEQ ID NO: 12|WP_039695303|gi 746743737|type II CRISPR RNA-guided endonuclease Cas9 [Streptococcus gallolyticus]; Sequence 3 (S3): SEQ ID NO: 13|WP_045635197|gi 782887988|type II CRISPR RNA-guided endonuclease Cas9 [Streptococcus mitis]; Sequence 4 (S4): SEQ ID NO: 14|5AXW_A|gi 924443546|Staphylococcus Aureus Cas9. The HNH domain (bold and underlined) and the RuvC domain (boxed) are identified for each of the four sequences. Amino acid residues 10 and 840 in S1 and the homologous amino acids in the aligned sequences are identified with an asterisk following the respective amino acid residue.

| | | | |
|---|---|---|---|
| S1 | 1 | --MDKK-YSIGLD*IGTNSVGWAVITDEYKVPSKKFKVLGNTDRHSIKKNLI--GALLFDSG--ETAEATRLKRTARRRYT | 73 |
| S2 | 1 | --MTKKNYSIGLD*IGTNSVGWAVITDDYKVPAKKMKVLGNTDKKYIKKNLL--GALLFDSG--ETAEATRLKRTARRRYT | 74 |
| S3 | 1 | --M-KKGYSIGLD*IGTNSVGFAVITDDYKVPSKKMKVLGNTDKRFIKKNLI--GALLFDEG--TTAEARRLKRTARRRYT | 73 |
| S4 | 1 | GSHMKRNYILGLD*IGITSVGYGII--DYET-----------------RDVIDAGVRLFKEANVENNEGRRSKRGARRLKR | 61 |
| S1 | 74 | RRKNRICYLQEIFSNEMAKVDDSFFHRLEESFLVEEDKKHERHPIFGNIVDEVAYHEKYPTIYHLRKKLVDSTDKADLRL | 153 |
| S2 | 75 | RRKNRLRYLQEIFANEIAKVDESFFQRLDESFLTDDDKTFDSHPIFGNKAEEDAYHQKFPTIYHLRKHLADSSEKADLRL | 154 |
| S3 | 74 | RRKNRLRYLQEIFSEEMSKVDSSFFHRLDDSFLIPEDKRESKYPIFATLTEEKEYHKQFPTIYHLRKQLADSKEKTDLRL | 153 |
| S4 | 62 | RRRHRIQRVKKLL--------------FDYNLLTD--------------------HSELSGINPYEARVKGLSQKLSEEE | 107 |
| S1 | 154 | IYLALAHMIKFRGHFLIEGDLNPDNSDVDKLFIQLVQTYNQLFEENPINASGVDAKAILSARLSKSRRLENLIAQLPGEK | 233 |
| S2 | 155 | VYLALAHMIKFRGHFLIEGELNAENTDVQKIFADFVGVYNRTFDDSHLSEITVDVASILTEKISKSRRLENLIKYYPTEK | 234 |
| S3 | 154 | IYLALAHNIKYRGHFLYEEAFDIKNNDIQKIFNEFISIYDNTFEGSSLSGQNAQVEAIFTDKISKSAKRERVLKLFPDEK | 233 |
| S4 | 108 | FSAALLHLAKRRG----------------------VHNVNEVEEDT---------------------------------- | 131 |
| S1 | 234 | KNGLFGNLIALSLGLTPNFKSNFDLAEDAKLQLSKDTYDDDLDNLLAQIGDQYADLFLAAKNLSDAILLSDILRVNTEIT | 313 |
| S2 | 235 | KNTLFGNLIALALGLQPNEKTNFKLSEDAKLQFSKDTYEEDLEELLGKIGDDYADLFTSAKNLYDAILLSGILTVDDNST | 314 |
| S3 | 234 | STGLFSEFLKLIVGNQADFKKHFDLEDKAPLQFSKDTYDEDLENLLGQIGDDFTDLFVSAKKLYDAILLSGILTVTDPST | 313 |
| S4 | 132 | -----GNELS------------------TKEQISRN-------------------------------------------- | 144 |
| S1 | 314 | KAPLSASMIKRYDEHHQDLTLLKALVRQQLPEKYKEIFFDQSKNGYAGYIDGGASQEEFYKFIKPILEKM--DGTEELLV | 391 |
| S2 | 315 | KAPLSASMIKRYVEHHEDLEKLKEFIKANKSELYHDIFKDKNKNGYAGYIENGVKQDEFYKYLKNILSKIKIDGSDYFLD | 394 |
| S3 | 314 | KAPLSASMIERYENHQNDLAALKQFIKNNLPEKYDEVFSDQSKDGYAGYIDGKTTQETFYKYIKNLLSKF--EGTDYFLD | 391 |
| S4 | 145 | ----SKALEEKYVAELQ-------------------------------------------------LERLKKDG------ | 165 |
| S1 | 392 | KLNREDLLRKQRTFDNGSIPHQIHLGELHAILRRQEDFYPFLKDNREKIEKILTFRIPYYVGPLARGNSRFAWMTRKSEE | 471 |
| S2 | 395 | KIEREDFLRKQRTFDNGSIPHQIHLQEMHAILRRQGDYYPFLKEKQDRIEKILTFRIPYYVGPLVRKDSRFAWAEYRSDE | 474 |
| S3 | 392 | KIEREDFLRKQRTFDNGSIPHQIHLQEMNAILRRQGEYYPFLKDRKEKIEKILTFRIPYYVGPLARGNRDFAWLTRNSDE | 471 |
| S4 | 166 | --EVRGSINRFKTSD--------YVKEAKQLLKVQKAYHQLDQSFIDTYIDLLETRRTYYEGP--GEGSPFGW------K | 227 |
| S1 | 472 | TITPWNFEEVVDKGASAQSFIERMTNFDKNLPNEKVLPKHSLLYEYFTVYNELTKVKYVTEGMRKPAFLSGEQKKAIVDL | 551 |
| S2 | 475 | KITPWNFDKVIDKEKSAEKFITRMTLNDLYLPEEKVLPKHSHVYETYAVYNELTKIKYVNEQGKE-SFFDSNMKQEIFDH | 553 |
| S3 | 472 | AIRPWNFEEIVDKASSAEDFINKMTNYDLYLPEEKVLPKHSLLYETFAVYNELTKVKFIAEGLRDYQFLDSGQKKQIVNQ | 551 |
| S4 | 228 | DIKEW---------------YEMLMGHCTYFPEELRSVKYAYNADLYNALNDLNNLVITRDENEK---LEYYEKFQIIEN | 289 |
| S1 | 552 | LFKTNRKVTVKQLKEDYFKKIECFDSVEISGVEDR---FNASLGTYHDLLKIIKDKDFLDNEENEDILEDIVLTLTLFED | 628 |
| S2 | 554 | VFKENRKVTKEKLLNYLNKEFPEYRIKDLIGLDKENKSFNASLGTYHDLKKIL-DKAFLDDKVNEEVIEDIIKTLTLFED | 632 |
| S3 | 552 | LFKENRKVTEKDIIHYLHN-VDGYDGIELKGIEKQ---FNASLSTYHDLLKIIKDKEFNDDAKNEAILENIVHTLTIFED | 627 |
| S4 | 290 | VFKQKKKPTLKQIAKEILVNEEDIKGYRVTSTGKPEF---TNLKVYHDIKDITARKEII---ENAELLDQIAKILTIYQS | 363 |
| S1 | 629 | REMIEERLKTYAHLFDDKVMKQLKR-RRYTGWGRLSRKLINGIRDKQSGKTILDFLKSDGFANRNFMQLIHDDSLTFKED | 707 |
| S2 | 633 | KDMIHERLQKYSDIFTANQLKKLER-RHYTGWGRLSYKLINGIRNKENNKTILDYLIDDGSANRNFMQLINDDTLPFKQI | 711 |
| S3 | 628 | REMIKQRLAQYDSLFDEKVIKALTR-RHYTGWGKLSAKLINGICDKQTGNTILDYLIDDGKINRNFMQLINDDGLSFKEI | 706 |
| S4 | 364 | SEDIQEELTNLNSELTQEEIEQISNLKGYTGTHNLSLKAINLILDE------LWHTNDNQIAIFNRLKLVP--------- | 428 |
| S1 | 708 | [chemical structure] | 781 |
| S2 | 712 | [chemical structure] | 784 |
| S3 | 707 | [chemical structure] | 779 |
| S4 | 429 | [chemical structure] | 505 |
| S1 | 782 | KRIEEGIKELGSQIL-------KEHPVENTQLQNEKLYLYYLQNGRDMYVDQELDINRLSD----YDVDH*IVPQSFLKDD | 850 |
| S2 | 785 | KKLQNSLKELGSNILNEEKPSYIEDKVENSHLQNDQLFLYYIQNGKDMYTGDELDIDHLSD----YDIDH*IIPQAFIKDD | 860 |
| S3 | 780 | KRIEDSLKILASGL---DSNILKENPTDNNQLQNDRLFLYYLQNGKDMYTGEALDINQLSS----YDIDH*IIPQAFIKDD | 852 |
| S4 | 506 | ERIEEIIRTTGK---------------ENAKYLIEKIKLHDMQEGKCLYSLEAIPLEDLLNNPFNYEVDH*IIPRSVSFDN | 570 |
| S1 | 851 | [chemical structure] | 922 |
| S2 | 861 | [chemical structure] | 932 |
| S3 | 853 | [chemical structure] | 924 |
| S4 | 571 | [chemical structure] | 650 |
| S1 | 923 | [chemical structure] | 1002 |
| S2 | 933 | [chemical structure] | 1012 |
| S3 | 925 | [chemical structure] | 1004 |
| S4 | 651 | [chemical structure] | 712 |
| S1 | 1003 | [chemical structure] | 1077 |
| S2 | 1013 | [chemical structure] | 1083 |
| S3 | 1005 | [chemical structure] | 1081 |
| S4 | 713 | [chemical structure] | 764 |
| S1 | 1078 | [chemical structure] | 1149 |
| S2 | 1084 | [chemical structure] | 1158 |
| S3 | 1082 | [chemical structure] | 1156 |
| S4 | 765 | [chemical structure] | 835 |
| S1 | 1150 | EKGKSKKLKSVKELLGITIMERSSFEKNPI-DFLEAKG-----YKEVKKDLIIKLPKYSLFELENGRKRMLASAGELQKG | 1223 |
| S2 | 1159 | EKGKAKKLKTVKELVGISIMERSFFEENPV-EFLENKG-----YHNIREDKLIKLPKYSLFEFEGGRRRLLASASELQKG | 1232 |
| S3 | 1157 | EKGKAKKLKTVKTLVGITIMEKAAFEENPI-TFLENKG-----YHNVRKENILCLPKYSLFELENGRRRLLASAKELQKG | 1230 |
| S4 | 836 | DPQTYQKLK--------LIMEQYGDEKNPLYKYYEETGNYLTKYSKKDNGPVIKKIKYYGNKLNAHLDITDDYPNSRNKV | 907 |
| S1 | 1224 | NELALPSKYVNFLYLASHYEKLKGSPEDNEQKQLFVEQHKHYLDEITEQISEFSKRVILADANLDKVLSAYNKH------ | 1297 |
| S2 | 1233 | NEMVLPGYLVELLYHAHRADNF-----NSTEYLNYVSEHKKEFEKVLSCVEDFANLYVDVEKNLSKIRAVADSM------ | 1301 |
| S3 | 1231 | NEIVLPVYLTTLLYHSKNVHKL-----DEPGHLEYIQKHRNEFKDLLNLVSEFSQKYVLADANLEKIKSLYADN------ | 1299 |
| S4 | 908 | VKLSLKPYRFD-VYLDNGVYKFV-----TVKNLDVIK--KENYYEVNSKAYEEAKKLKKISNQAEFIASFYNNDLIKING | 979 |
| S1 | 1298 | RDKPIREQAENIIHLFTLTNLGAPAAFKYFDTTIDRKRYTSTKEVLDATLIHQSIT--------GLYETRI----DLSQL | 1365 |
| S2 | 1302 | DNFSIEEISNSFINLLTLTALGAPADFNFLGEKIPRKRYTSTKECLNATLIHQSIT--------GLYETRI----DLSKL | 1369 |
| S3 | 1300 | EQADIEILANSFINLLTFTALGAPAAFKFFGKDIDRKRYTTVSEILNATLIHQSIT--------GLYETWI----DLSKL | 1367 |
| S4 | 980 | ELYRVIGVNNDLLNRIEVNMIDITYR-EYLENMNDKRPPRIIKTIASKT---QSIKKYSTDILGNLYEVKSKKHPQIIKK | 1055 |
| S1 | 1366 | GGD | 1368 |
| S2 | 1370 | GEE | 1372 |
| S3 | 1368 | GED | 1370 |
| S4 | 1056 | G-- | 1056 |

[0311] The alignment demonstrates that amino acid sequences and amino acid residues that are homologous to a reference Cas9 amino acid sequence or amino acid residue can be identified across Cas9 sequence variants, including, but not limited to Cas9 sequences from different species, by identifying the amino acid sequence or residue that aligns with the reference sequence or the reference residue using alignment programs and algorithms known in the art. This disclosure provides Cas9 variants in which one or more of the amino acid residues identified by an asterisk in SEQ ID NOs: 11-14 (e.g., S1, S2, S3, and S4, respectively) are mutated as described herein. The residues D10 and H840 in Cas9 of SEQ ID NO: 1 that correspond to the residues identified in SEQ ID NOs: 11-14 by an asterisk are referred to herein as “homologous” or “corresponding” residues. Such homologous residues can be identified by sequence alignment, e.g., as described above, and by identifying the sequence or residue that aligns with the reference sequence or residue. Similarly, mutations in Cas9 sequences that correspond to mutations identified in SEQ ID NO: 1 herein, e.g., mutations of residues 10, and 840 in SEQ ID NO: 1, are referred to herein as “homologous” or “corresponding” mutations. For example, the mutations corresponding to the D10A mutation in SEQ ID NO: 1 or 51 (SEQ ID NO: 11) for the four aligned sequences above are D11A for S2, D10A for S3, and D13A for S4; the corresponding mutations for H840A in SEQ ID NO: 1 or 51 (SEQ ID NO: 11) are H850A for S2, H842A for S3, and H560A for S4.

[0312] A total of 250 Cas9 sequences (SEQ ID NOs: 11-260) from different species are provided. Amino acid residues homologous to residues 10, and 840 of SEQ ID NO: 1 may be identified in the same manner as outlined above. All of these Cas9 sequences may be used in accordance with the present disclosure.

| | |
|---|---|
| WP_010922251.1 | type II CRISPR RNA-guided endonuclease Cas9 [Streptococcus pyogenes] SEQ ID NO: 11 |
| WP_039695303.1 | type II CRISPR RNA-guided endonuclease Cas9 [Streptococcus gallolyticus] SEQ ID NO: 12 |
| WP_045635197.1 | type II CRISPR RNA-guided endonuclease Cas9 [Streptococcus mitis] SEQ ID NO: 13 |
| 5AXW_A | Cas9, Chain A, Crystal Structure [Staphylococcus Aureus] SEQ ID NO: 14 |
| WP_009880683.1 | type II CRISPR RNA-guided endonuclease Cas9 [Streptococcus pyogenes] SEQ ID NO: 15 |
| WP_010922251.1 | type II CRISPR RNA-guided endonuclease Cas9 [Streptococcus pyogenes] SEQ ID NO: 16 |
| WP_011054416.1 | type II CRISPR RNA-guided endonuclease Cas9 [Streptococcus pyogenes] SEQ ID NO: 17 |
| WP_011284745.1 | type II CRISPR RNA-guided endonuclease Cas9 [Streptococcus pyogenes] SEQ ID NO: 18 |
| WP_011285506.1 | type II CRISPR RNA-guided endonuclease Cas9 [Streptococcus pyogenes] SEQ ID NO: 19 |
| WP_011527619.1 | type II CRISPR RNA-guided endonuclease Cas9 [Streptococcus pyogenes] SEQ ID NO: 20 |
| WP_012560673.1 | type II CRISPR RNA-guided endonuclease Cas9 [Streptococcus pyogenes] SEQ ID NO: 21 |
| WP_014407541.1 | type II CRISPR RNA-guided endonuclease Cas9 [Streptococcus pyogenes] SEQ ID NO: 22 |
| WP_020905136.1 | type II CRISPR RNA-guided endonuclease Cas9 [Streptococcus pyogenes] SEQ ID NO: 23 |
| WP_023080005.1 | type II CRISPR RNA-guided endonuclease Cas9 [Streptococcus pyogenes] SEQ ID NO: 24 |
| WP_023610282.1 | type II CRISPR RNA-guided endonuclease Cas9 [Streptococcus pyogenes] SEQ ID NO: 25 |
| WP_030125963.1 | type II CRISPR RNA-guided endonuclease Cas9 [Streptococcus pyogenes] SEQ ID NO: 26 |
| WP_030126706.1 | type II CRISPR RNA-guided endonuclease Cas9 [Streptococcus pyogenes] SEQ ID NO: 27 |
| WP_031488318.1 | type II CRISPR RNA-guided endonuclease Cas9 [Streptococcus pyogenes] SEQ ID NO: 28 |
| WP_032460140.1 | type II CRISPR RNA-guided endonuclease Cas9 [Streptococcus pyogenes] SEQ ID NO: 29 |
| WP_032461047.1 | type II CRISPR RNA-guided endonuclease Cas9 [Streptococcus pyogenes] SEQ ID NO: 30 |
| WP_032462016.1 | type II CRISPR RNA-guided endonuclease Cas9 [Streptococcus pyogenes] SEQ ID NO: 31 |
| WP_032462936.1 | type II CRISPR RNA-guided endonuclease Cas9 [Streptococcus pyogenes] SEQ ID NO: 32 |
| WP_032464890.1 | type II CRISPR RNA-guided endonuclease Cas9 [Streptococcus pyogenes] SEQ ID NO: 33 |
| WP_033888930.1 | type II CRISPR RNA-guided endonuclease Cas9 [Streptococcus pyogenes] SEQ ID NO: 34 |
| WP_038431314.1 | type II CRISPR RNA-guided endonuclease Cas9 [Streptococcus pyogenes] SEQ ID NO: 35 |
| WP_038432938.1 | type II CRISPR RNA-guided endonuclease Cas9 [Streptococcus pyogenes] SEQ ID NO: 36 |
| WP_038434062.1 | type II CRISPR RNA-guided endonuclease Cas9 [Streptococcus pyogenes] SEQ ID NO: 37 |
| BAQ51233.1 | CRISPR-associated protein, Csn1 family [Streptococcus pyogenes] SEQ ID NO: 38 |
| KGE60162.1 | hypothetical protein MGAS2111_0903 [Streptococcus pyogenes MGAS2111] SEQ ID NO: 39 |
| KGE60856.1 | CRISPR-associated endonuclease protein [Streptococcus pyogenes SS1447] SEQ ID NO: 40 |
| WP_002989955.1 | MULTISPECIES: type II CRISPR RNA-guided endonuclease Cas9 [Streptococcus] SEQ ID NO: 41 |
| WP_003030002.1 | MULTISPECIES: type II CRISPR RNA-guided endonuclease Cas9 [Streptococcus] SEQ ID NO: 42 |
| WP_003065552.1 | MULTISPECIES: type II CRISPR RNA-guided endonuclease Cas9 [Streptococcus] SEQ ID NO: 43 |
| WP_001040076.1 | type II CRISPR RNA-guided endonuclease Cas9 [Streptococcus agalactiae] SEQ ID NO: 44 |
| WP_001040078.1 | type II CRISPR RNA-guided endonuclease Cas9 [Streptococcus agalactiae] SEQ ID NO: 45 |
| WP_001040080.1 | type II CRISPR RNA-guided endonuclease Cas9 [Streptococcus agalactiae] SEQ ID NO: 46 |
| WP_001040081.1 | type II CRISPR RNA-guided endonuclease Cas9 [Streptococcus agalactiae] SEQ ID NO: 47 |
| WP_001040083.1 | type II CRISPR RNA-guided endonuclease Cas9 [Streptococcus agalactiae] SEQ ID NO: 48 |
| WP_001040085.1 | type II CRISPR RNA-guided endonuclease Cas9 [Streptococcus agalactiae] SEQ ID NO: 49 |
| WP_001040087.1 | type II CRISPR RNA-guided endonuclease Cas9 [Streptococcus agalactiae] SEQ ID NO: 50 |
| WP_001040088.1 | type II CRISPR RNA-guided endonuclease Cas9 [Streptococcus agalactiae] SEQ ID NO: 51 |
| WP_001040089.1 | type II CRISPR RNA-guided endonuclease Cas9 [Streptococcus agalactiae] SEQ ID NO: 52 |
| WP_001040090.1 | type II CRISPR RNA-guided endonuclease Cas9 [Streptococcus agalactiae] SEQ ID NO: 53 |
| WP_001040091.1 | type II CRISPR RNA-guided endonuclease Cas9 [Streptococcus agalactiae] SEQ ID NO: 54 |
| WP_001040092.1 | type II CRISPR RNA-guided endonuclease Cas9 [Streptococcus agalactiae] SEQ ID NO: 55 |
| WP_001040094.1 | type II CRISPR RNA-guided endonuclease Cas9 [Streptococcus agalactiae] SEQ ID NO: 56 |
| WP_001040095.1 | type II CRISPR RNA-guided endonuclease Cas9 [Streptococcus agalactiae] SEQ ID NO: 57 |
| WP_001040096.1 | type II CRISPR RNA-guided endonuclease Cas9 [Streptococcus agalactiae] SEQ ID NO: 58 |
| WP_001040097.1 | type II CRISPR RNA-guided endonuclease Cas9 [Streptococcus agalactiae] SEQ ID NO: 59 |
| WP_001040098.1 | type II CRISPR RNA-guided endonuclease Cas9 [Streptococcus agalactiae] SEQ ID NO: 60 |
| WP_001040099.1 | type II CRISPR RNA-guided endonuclease Cas9 [Streptococcus agalactiae] SEQ ID NO: 61 |
| WP_001040100.1 | type II CRISPR RNA-guided endonuclease Cas9 [Streptococcus agalactiae] SEQ ID NO: 62 |
| WP_001040104.1 | type II CRISPR RNA-guided endonuclease Cas9 [Streptococcus agalactiae] SEQ ID NO: 63 |
| WP_001040105.1 | type II CRISPR RNA-guided endonuclease Cas9 [Streptococcus agalactiae] SEQ ID NO: 64 |
| WP_001040106.1 | type II CRISPR RNA-guided endonuclease Cas9 [Streptococcus agalactiae] SEQ ID NO: 65 |
| WP_001040107.1 | type II CRISPR RNA-guided endonuclease Cas9 [Streptococcus agalactiae] SEQ ID NO: 66 |
| WP_001040108.1 | type II CRISPR RNA-guided endonuclease Cas9 [Streptococcus agalactiae] SEQ ID NO: 67 |
| WP_001040109.1 | type II CRISPR RNA-guided endonuclease Cas9 [Streptococcus agalactiae] SEQ ID NO: 68 |
| WP_001040110.1 | type II CRISPR RNA-guided endonuclease Cas9 [Streptococcus agalactiae] SEQ ID NO: 69 |
| WP_015058523.1 | type II CRISPR RNA-guided endonuclease Cas9 [Streptococcus agalactiae] SEQ ID NO: 70 |
| WP_017643650.1 | type II CRISPR RNA-guided endonuclease Cas9 [Streptococcus agalactiae] SEQ ID NO: 71 |
| WP_017647151.1 | type II CRISPR RNA-guided endonuclease Cas9 [Streptococcus agalactiae] SEQ ID NO: 72 |
| WP_017648376.1 | type II CRISPR RNA-guided endonuclease Cas9 [Streptococcus agalactiae] SEQ ID NO: 73 |
| WP_017649527.1 | type II CRISPR RNA-guided endonuclease Cas9 [Streptococcus agalactiae] SEQ ID NO: 74 |
| WP_017771611.1 | type II CRISPR RNA-guided endonuclease Cas9 [Streptococcus agalactiae] SEQ ID NO: 75 |
| WP_017771984.1 | type II CRISPR RNA-guided endonuclease Cas9 [Streptococcus agalactiae] SEQ ID NO: 76 |
| CFQ25032.1 | CRISPR-associated protein [Streptococcus agalactiae] SEQ ID NO: 77 |
| CFV16040.1 | CRISPR-associated protein [Streptococcus agalactiae] SEQ ID NO: 78 |
| KLJ37842.1 | CRISPR-associated protein Csn1 [Streptococcus agalactiae] SEQ ID NO: 79 |
| KLJ72361.1 | CRISPR-associated protein Csn1 [Streptococcus agalactiae] SEQ ID NO: 80 |
| KLL20707.1 | CRISPR-associated protein Csn1 [Streptococcus agalactiae] SEQ ID NO: 81 |
| KLL42645.1 | CRISPR-associated protein Csn1 [Streptococcus agalactiae] SEQ ID NO: 82 |
| WP_047207273.1 | type II CRISPR RNA-guided endonuclease Cas9 [Streptococcus agalactiae] SEQ ID NO: 83 |
| WP_047209694.1 | type II CRISPR RNA-guided endonuclease Cas9 [Streptococcus agalactiae] SEQ ID NO: 84 |
| WP_050198062.1 | type II CRISPR RNA-guided endonuclease Cas9 [Streptococcus agalactiae] SEQ ID NO: 85 |
| WP_050201642.1 | type II CRISPR RNA-guided endonuclease Cas9 [Streptococcus agalactiae] SEQ ID NO: 86 |
| WP_050204027.1 | type II CRISPR RNA-guided endonuclease Cas9 [Streptococcus agalactiae] SEQ ID NO: 87 |
| WP_050881965.1 | type II CRISPR RNA-guided endonuclease Cas9 [Streptococcus agalactiae] SEQ ID NO: 88 |
| WP_050886065.1 | type II CRISPR RNA-guided endonuclease Cas9 [Streptococcus agalactiae] SEQ ID NO: 89 |
| AHN30376.1 | CRISPR-associated protein Csn1 [Streptococcus agalactiae 138P] SEQ ID NO: 90 |
| EAO78426.1 | reticulocyte binding protein [Streptococcus agalactiae H36B] SEQ ID NO: 91 |
| CCW42055.1 | CRISPR-associated protein, SAG0894 family [Streptococcus agalactiae ILRI112] SEQ ID NO: 92 |
| WP_003041502.1 | type II CRISPR RNA-guided endonuclease Cas9 [Streptococcus anginosus] SEQ ID NO: 93 |
| WP_037593752.1 | type II CRISPR RNA-guided endonuclease Cas9 [Streptococcus anginosus] SEQ ID NO: 94 |
| WP_049516684.1 | CRISPR-associated protein Csn1 [Streptococcus anginosus] SEQ ID NO: 95 |
| GAD46167.1 | hypothetical protein ANG6_0662 [Streptococcus anginosus T5] SEQ ID NO: 96 |
| WP_018363470.1 | type II CRISPR RNA-guided endonuclease Cas9 [Streptococcus caballi] SEQ ID NO: 97 |
| WP_003043819.1 | type II CRISPR RNA-guided endonuclease Cas9 [Streptococcus canis] SEQ ID NO: 98 |
| WP_006269658.1 | type II CRISPR RNA-guided endonuclease Cas9 [Streptococcus constellatus] SEQ ID NO: 99 |
| WP_048800889.1 | type II CRISPR RNA-guided endonuclease Cas9 [Streptococcus constellatus] SEQ ID NO: 100 |
| WP_012767106.1 | type II CRISPR RNA-guided endonuclease Cas9 [Streptococcus dysgalactiae] SEQ ID NO: 101 |
| WP_014612333.1 | type II CRISPR RNA-guided endonuclease Cas9 [Streptococcus dysgalactiae] SEQ ID NO: 102 |
| WP_015017095.1 | type II CRISPR RNA-guided endonuclease Cas9 [Streptococcus dysgalactiae] SEQ ID NO: 103 |
| WP_015057649.1 | type II CRISPR RNA-guided endonuclease Cas9 [Streptococcus dysgalactiae] SEQ ID NO: 104 |
| WP_048327215.1 | type II CRISPR RNA-guided endonuclease Cas9 [Streptococcus dysgalactiae] SEQ ID NO: 105 |
| WP_049519324.1 | CRISPR-associated protein Csn1 [Streptococcus dysgalactiae] SEQ ID NO: 106 |
| WP_012515931.1 | type II CRISPR RNA-guided endonuclease Cas9 [Streptococcus equi] SEQ ID NO: 107 |
| WP_021320964.1 | type II CRISPR RNA-guided endonuclease Cas9 [Streptococcus equi] SEQ ID NO: 108 |
| WP_037581760.1 | type II CRISPR RNA-guided endonuclease Cas9 [Streptococcus equi] SEQ ID NO: 109 |
| WP_004232481.1 | type II CRISPR RNA-guided endonuclease Cas9 [Streptococcus equinus] SEQ ID NO: 110 |
| WP_009854540.1 | type II CRISPR RNA-guided endonuclease Cas9 [Streptococcus gallolyticus] SEQ ID NO: 111 |
| WP_012962174.1 | type II CRISPR RNA-guided endonuclease Cas9 [Streptococcus gallolyticus] SEQ ID NO: 112 |
| WP_039695303.1 | type II CRISPR RNA-guided endonuclease Cas9 [Streptococcus gallolyticus] SEQ ID NO: 113 |
| WP_014334983.1 | type II CRISPR RNA-guided endonuclease Cas9 [Streptococcus infantarius] SEQ ID NO: 114 |
| WP_003099269.1 | type II CRISPR RNA-guided endonuclease Cas9 [Streptococcus iniae] SEQ ID NO: 115 |
| AHY15608.1 | CRISPR-associated protein Csn1 [Streptococcus iniae] SEQ ID NO: 116 |
| AHY17476.1 | CRISPR-associated protein Csn1 [Streptococcus iniae] SEQ ID NO: 117 |
| ESR09100.1 | hypothetical protein IUSA1_08595 [Streptococcus iniae IUSA1] SEQ ID NO: 118 |
| AGM98575.1 | CRISPR-associated protein Cas9/Csn1, subtype II/NMEMI [Streptococcus iniae SF1] SEQ ID NO: 119 |
| ALF27331.1 | CRISPR-associated protein Csn1 [Streptococcus intermedius] SEQ ID NO: 120 |
| WP_018372492.1 | type II CRISPR RNA-guided endonuclease Cas9 [Streptococcus massiliensis] SEQ ID NO: 121 |
| WP_045618028.1 | type II CRISPR RNA-guided endonuclease Cas9 [Streptococcus mitis] SEQ ID NO: 122 |
| WP_045635197.1 | type II CRISPR RNA-guided endonuclease Cas9 [Streptococcus mitis] SEQ ID NO: 123 |
| WP_002263549.1 | type II CRISPR RNA-guided endonuclease Cas9 [Streptococcus mutans] SEQ ID NO: 124 |
| WP_002263887.1 | type II CRISPR RNA-guided endonuclease Cas9 [Streptococcus mutans] SEQ ID NO: 125 |
| WP_002264920.1 | type II CRISPR RNA-guided endonuclease Cas9 [Streptococcus mutans] SEQ ID NO: 126 |
| WP_002269043.1 | type II CRISPR RNA-guided endonuclease Cas9 [Streptococcus mutans] SEQ ID NO: 127 |
| WP_002269448.1 | type II CRISPR RNA-guided endonuclease Cas9 [Streptococcus mutans] SEQ ID NO: 128 |
| WP_002271977.1 | type II CRISPR RNA-guided endonuclease Cas9 [Streptococcus mutans] SEQ ID NO: 129 |
| WP_002272766.1 | type II CRISPR RNA-guided endonuclease Cas9 [Streptococcus mutans] SEQ ID NO: 130 |
| WP_002273241.1 | type II CRISPR RNA-guided endonuclease Cas9 [Streptococcus mutans] SEQ ID NO: 131 |
| WP_002275430.1 | type II CRISPR RNA-guided endonuclease Cas9 [Streptococcus mutans] SEQ ID NO: 132 |
| WP_002276448.1 | type II CRISPR RNA-guided endonuclease Cas9 [Streptococcus mutans] SEQ ID NO: 133 |
| WP_002277050.1 | type II CRISPR RNA-guided endonuclease Cas9 [Streptococcus mutans] SEQ ID NO: 134 |
| WP_002277364.1 | type II CRISPR RNA-guided endonuclease Cas9 [Streptococcus mutans] SEQ ID NO: 135 |
| WP_002279025.1 | type II CRISPR RNA-guided endonuclease Cas9 [Streptococcus mutans] SEQ ID NO: 136 |
| WP_002279859.1 | type II CRISPR RNA-guided endonuclease Cas9 [Streptococcus mutans] SEQ ID NO: 137 |
| WP_002280230.1 | type II CRISPR RNA-guided endonuclease Cas9 [Streptococcus mutans] SEQ ID NO: 138 |
| WP_002281696.1 | type II CRISPR RNA-guided endonuclease Cas9 [Streptococcus mutans] SEQ ID NO: 139 |
| WP_002282247.1 | type II CRISPR RNA-guided endonuclease Cas9 [Streptococcus mutans] SEQ ID NO: 140 |
| WP_002282906.1 | type II CRISPR RNA-guided endonuclease Cas9 [Streptococcus mutans] SEQ ID NO: 141 |
| WP_002283846.1 | type II CRISPR RNA-guided endonuclease Cas9 [Streptococcus mutans] SEQ ID NO: 142 |
| WP_002287255.1 | type II CRISPR RNA-guided endonuclease Cas9 [Streptococcus mutans] SEQ ID NO: 143 |
| WP_002288990.1 | type II CRISPR RNA-guided endonuclease Cas9 [Streptococcus mutans] SEQ ID NO: 144 |
| WP_002289641.1 | type II CRISPR RNA-guided endonuclease Cas9 [Streptococcus mutans] SEQ ID NO: 145 |
| WP_002290427.1 | type II CRISPR RNA-guided endonuclease Cas9 [Streptococcus mutans] SEQ ID NO: 146 |
| WP_002295753.1 | type II CRISPR RNA-guided endonuclease Cas9 [Streptococcus mutans] SEQ ID NO: 147 |
| WP_002296423.1 | type II CRISPR RNA-guided endonuclease Cas9 [Streptococcus mutans] SEQ ID NO: 148 |
| WP_002304487.1 | type II CRISPR RNA-guided endonuclease Cas9 [Streptococcus mutans] SEQ ID NO: 149 |
| WP_002305844.1 | type II CRISPR RNA-guided endonuclease Cas9 [Streptococcus mutans] SEQ ID NO: 150 |
| WP_002307203.1 | type II CRISPR RNA-guided endonuclease Cas9 [Streptococcus mutans] SEQ ID NO: 151 |
| WP_002310390.1 | type II CRISPR RNA-guided endonuclease Cas9 [Streptococcus mutans] SEQ ID NO: 152 |
| WP_002352408.1 | type II CRISPR RNA-guided endonuclease Cas9 [Streptococcus mutans] SEQ ID NO: 153 |
| WP_012997688.1 | type II CRISPR RNA-guided endonuclease Cas9 [Streptococcus mutans] SEQ ID NO: 154 |
| WP_014677909.1 | type II CRISPR RNA-guided endonuclease Cas9 [Streptococcus mutans] SEQ ID NO: 155 |
| WP_019312892.1 | type II CRISPR RNA-guided endonuclease Cas9 [Streptococcus mutans] SEQ ID NO: 156 |
| WP_019313659.1 | type II CRISPR RNA-guided endonuclease Cas9 [Streptococcus mutans] SEQ ID NO: 157 |
| WP_019314093.1 | type II CRISPR RNA-guided endonuclease Cas9 [Streptococcus mutans] SEQ ID NO: 158 |
| WP_019315370.1 | type II CRISPR RNA-guided endonuclease Cas9 [Streptococcus mutans] SEQ ID NO: 159 |
| WP_019803776.1 | type II CRISPR RNA-guided endonuclease Cas9 [Streptococcus mutans] SEQ ID NO: 160 |
| WP_019805234.1 | type II CRISPR RNA-guided endonuclease Cas9 [Streptococcus mutans] SEQ ID NO: 161 |
| WP_024783594.1 | type II CRISPR RNA-guided endonuclease Cas9 [Streptococcus mutans] SEQ ID NO: 162 |
| WP_024784288.1 | type II CRISPR RNA-guided endonuclease Cas9 [Streptococcus mutans] SEQ ID NO: 163 |
| WP_024784666.1 | type II CRISPR RNA-guided endonuclease Cas9 [Streptococcus mutans] SEQ ID NO: 164 |
| WP_024784894.1 | type II CRISPR RNA-guided endonuclease Cas9 [Streptococcus mutans] SEQ ID NO: 165 |
| WP_024786433.1 | type II CRISPR RNA-guided endonuclease Cas9 [Streptococcus mutans] SEQ ID NO: 166 |
| WP_049473442.1 | CRISPR-associated protein Csn1 [Streptococcus mutans] SEQ ID NO: 167 |
| WP_049474547.1 | CRISPR-associated protein Csn1 [Streptococcus mutans] SEQ ID NO: 168 |
| EMC03581.1 | hypothetical protein SMU69_09359 [Streptococcus mutans NLML4] SEQ ID NO: 169 |
| WP_000428612.1 | type II CRISPR RNA-guided endonuclease Cas9 [Streptococcus oralis] SEQ ID NO: 170 |
| WP_000428613.1 | type II CRISPR RNA-guided endonuclease Cas9 [Streptococcus oralis] SEQ ID NO: 171 |
| WP_049523028.1 | CRISPR-associated protein Csn1 [Streptococcus parasanguinis] SEQ ID NO: 172 |
| WP_003107102.1 | type II CRISPR RNA-guided endonuclease Cas9 [Streptococcus parauberis] SEQ ID NO: 173 |
| WP_054279288.1 | type II CRISPR RNA-guided endonuclease Cas9 [Streptococcus phocae] SEQ ID NO: 174 |
| WP_049531101.1 | CRISPR-associated protein Csn1 [Streptococcus pseudopneumoniae] SEQ ID NO: 175 |
| WP_049538452.1 | CRISPR-associated protein Csn1 [Streptococcus pseudopneumoniae] SEQ ID NO: 176 |
| WP_049549711.1 | CRISPR-associated protein Csn1 [Streptococcus pseudopneumoniae] SEQ ID NO: 177 |
| WP_007896501.1 | type II CRISPR RNA-guided endonuclease Cas9 [Streptococcus pseudoporcinus] SEQ ID NO: 178 |
| EFR44625.1 | CRISPR-associated protein, Csn1 family [Streptococcus pseudoporcinus SPIN 20026] SEQ ID NO: 179 |
| WP_002897477.1 | type II CRISPR RNA-guided endonuclease Cas9 [Streptococcus sanguinis] SEQ ID NO: 180 |
| WP_002906454.1 | type II CRISPR RNA-guided endonuclease Cas9 [Streptococcus sanguinis] SEQ ID NO: 181 |
| WP_009729476.1 | type II CRISPR RNA-guided endonuclease Cas9 [Streptococcus sp. F0441] SEQ ID NO: 182 |
| CQR24647.1 | CRISPR-associated protein [Streptococcus sp. FF10] SEQ ID NO: 183 |
| WP_000066813.1 | type II CRISPR RNA-guided endonuclease Cas9 [Streptococcus sp. M334] SEQ ID NO: 184 |
| WP_009754323.1 | type II CRISPR RNA-guided endonuclease Cas9 [Streptococcus sp. taxon 056] SEQ ID NO: 185 |
| WP_044674937.1 | type II CRISPR RNA-guided endonuclease Cas9 [Streptococcus suis] SEQ ID NO: 186 |
| WP_044676715.1 | type II CRISPR RNA-guided endonuclease Cas9 [Streptococcus suis] SEQ ID NO: 187 |
| WP_044680361.1 | type II CRISPR RNA-guided endonuclease Cas9 [Streptococcus suis] SEQ ID NO: 188 |
| WP_044681799.1 | type II CRISPR RNA-guided endonuclease Cas9 [Streptococcus suis] SEQ ID NO: 189 |
| WP_049533112.1 | CRISPR-associated protein Csn1 [Streptococcus suis] SEQ ID NO: 190 |
| WP_029090905.1 | type II CRISPR RNA-guided endonuclease Cas9 [Brochothrix thermosphacta] SEQ ID NO: 191 |
| WP_006506696.1 | type II CRISPR RNA-guided endonuclease Cas9 [Catenibacterium mitsuokai] SEQ ID NO: 192 |
| AIT42264.1 | Cas9hc:NLS:HA [Cloning vector pYB196] SEQ ID NO: 193 |
| WP_034440723.1 | type II CRISPR endonuclease Cas9 [Clostridiales bacterium S5-A11] SEQ ID NO: 194 |
| AKQ21048.1 | Cas9 [CRISPR-mediated gene targeting vector p(bhsp68-Cas9)] SEQ ID NO: 195 |
| WP_004636532.1 | type II CRISPR RNA-guided endonuclease Cas9 [Dolosigranulum pigrum] SEQ ID NO: 196 |
| WP_002364836.1 | MULTISPECIES: type II CRISPR RNA-guided endonuclease Cas9 [Enterococcus] SEQ ID NO: 197 |
| WP_016631044.1 | MULTISPECIES: type II CRISPR RNA-guided endonuclease Cas9 [Enterococcus] SEQ ID NO: 198 |
| EMS75795.1 | hypothetical protein H318_06676 [Enterococcus durans IPLA 655] SEQ ID NO: 199 |
| WP_002373311.1 | type II CRISPR RNA-guided endonuclease Cas9 [Enterococcus faecalis] SEQ ID NO: 200 |
| WP_002378009.1 | type II CRISPR RNA-guided endonuclease Cas9 [Enterococcus faecalis] SEQ ID NO: 201 |
| WP_002407324.1 | type II CRISPR RNA-guided endonuclease Cas9 [Enterococcus faecalis] SEQ ID NO: 202 |
| WP_002413717.1 | type II CRISPR RNA-guided endonuclease Cas9 [Enterococcus faecalis] SEQ ID NO: 203 |
| WP_010775580.1 | type II CRISPR RNA-guided endonuclease Cas9 [Enterococcus faecalis] SEQ ID NO: 204 |
| WP_010818269.1 | type II CRISPR RNA-guided endonuclease Cas9 [Enterococcus faecalis] SEQ ID NO: 205 |
| WP_010824395.1 | type II CRISPR RNA-guided endonuclease Cas9 [Enterococcus faecalis] SEQ ID NO: 206 |
| WP_016622645.1 | type II CRISPR RNA-guided endonuclease Cas9 [Enterococcus faecalis] SEQ ID NO: 207 |
| WP_033624816.1 | type II CRISPR RNA-guided endonuclease Cas9 [Enterococcus faecalis] SEQ ID NO: 208 |
| WP_033625576.1 | type II CRISPR RNA-guided endonuclease Cas9 [Enterococcus faecalis] SEQ ID NO: 209 |
| WP_033789179.1 | type II CRISPR RNA-guided endonuclease Cas9 [Enterococcus faecalis] SEQ ID NO: 210 |
| WP_002310644.1 | type II CRISPR RNA-guided endonuclease Cas9 [Enterococcus faecium] SEQ ID NO: 211 |
| WP_002312694.1 | type II CRISPR RNA-guided endonuclease Cas9 [Enterococcus faecium] SEQ ID NO: 212 |
| WP_002314015.1 | type II CRISPR RNA-guided endonuclease Cas9 [Enterococcus faecium] SEQ ID NO: 213 |
| WP_002320716.1 | type II CRISPR RNA-guided endonuclease Cas9 [Enterococcus faecium] SEQ ID NO: 214 |
| WP_002330729.1 | type II CRISPR RNA-guided endonuclease Cas9 [Enterococcus faecium] SEQ ID NO: 215 |
| WP_002335161.1 | type II CRISPR RNA-guided endonuclease Cas9 [Enterococcus faecium] SEQ ID NO: 216 |
| WP_002345439.1 | type II CRISPR RNA-guided endonuclease Cas9 [Enterococcus faecium] SEQ ID NO: 217 |
| WP_034867970.1 | type II CRISPR RNA-guided endonuclease Cas9 [Enterococcus faecium] SEQ ID NO: 218 |
| WP_047937432.1 | type II CRISPR RNA-guided endonuclease Cas9 [Enterococcus faecium] SEQ ID NO: 219 |
| WP_010720994.1 | type II CRISPR RNA-guided endonuclease Cas9 [Enterococcus hirae] SEQ ID NO: 220 |
| WP_010737004.1 | type II CRISPR RNA-guided endonuclease Cas9 [Enterococcus hirae] SEQ ID NO: 221 |
| WP_034700478.1 | type II CRISPR RNA-guided endonuclease Cas9 [Enterococcus hirae] SEQ ID NO: 222 |
| WP_007209003.1 | type II CRISPR RNA-guided endonuclease Cas9 [Enterococcus italicus] SEQ ID NO: 223 |
| WP_023519017.1 | type II CRISPR RNA-guided endonuclease Cas9 [Enterococcus mundtii] SEQ ID NO: 224 |
| WP_010770040.1 | type II CRISPR RNA-guided endonuclease Cas9 [Enterococcus phoeniculicola] SEQ ID NO: 225 |
| WP_048604708.1 | type II CRISPR RNA-guided endonuclease Cas9 [Enterococcus sp. AM1] SEQ ID NO: 226 |
| WP_010750235.1 | type II CRISPR RNA-guided endonuclease Cas9 [Enterococcus villorum] SEQ ID NO: 227 |
| AII16583.1 | Cas9 endonuclease [Expression vector pCas9] SEQ ID NO: 228 |
| WP_029073316.1 | type II CRISPR RNA-guided endonuclease Cas9 [Kandleria vitulina] SEQ ID NO: 229 |
| WP_031589969.1 | type II CRISPR RNA-guided endonuclease Cas9 [Kandleria vitulina] SEQ ID NO: 230 |
| KDA45870.1 | CRISPR-associated protein Cas9/Csn1, subtype II/NMEMI [Lactobacillus animalis] SEQ ID NO: 231 |
| WP_039099354.1 | type II CRISPR RNA-guided endonuclease Cas9 [Lactobacillus curvatus] SEQ ID NO: 232 |
| AKP02966.1 | hypothetical protein ABB45_04605 [Lactobacillus farciminis] SEQ ID NO: 233 |
| WP_010991369.1 | type II CRISPR RNA-guided endonuclease Cas9 [Listeria innocua] SEQ ID NO: 234 |
| WP_033838504.1 | type II CRISPR RNA-guided endonuclease Cas9 [Listeria innocua] SEQ ID NO: 235 |
| EHN60060.1 | CRISPR-associated protein, Csn1 family [Listeria innocua ATCC 33091] SEQ ID NO: 236 |
| EFR89594.1 | crispr-associated protein, Csn1 family [Listeria innocua FSL S4-378] SEQ ID NO: 237 |
| WP_038409211.1 | type II CRISPR RNA-guided endonuclease Cas9 [Listeria ivanovii] SEQ ID NO: 238 |
| EFR95520.1 | crispr-associated protein Csn1 [Listeria ivanoviiFSL F6-596] SEQ ID NO: 239 |
| WP_003723650.1 | type II CRISPR RNA-guided endonuclease Cas9 [Listeria monocytogenes] SEQ ID NO: 240 |
| WP_003727705.1 | type II CRISPR RNA-guided endonuclease Cas9 [Listeria monocytogenes] SEQ ID NO: 241 |
| WP_003730785.1 | type II CRISPR RNA-guided endonuclease Cas9 [Listeria monocytogenes] SEQ ID NO: 242 |
| WP_003733029.1 | type II CRISPR RNA-guided endonuclease Cas9 [Listeria monocytogenes] SEQ ID NO: 243 |
| WP_003739838.1 | type II CRISPR RNA-guided endonuclease Cas9 [Listeria monocytogenes] SEQ ID NO: 244 |
| WP_014601172.1 | type II CRISPR RNA-guided endonuclease Cas9 [Listeria monocytogenes] SEQ ID NO: 245 |
| WP_023548323.1 | type II CRISPR RNA-guided endonuclease Cas9 [Listeria monocytogenes] SEQ ID NO: 246 |
| WP_031665337.1 | type II CRISPR RNA-guided endonuclease Cas9 [Listeria monocytogenes] SEQ ID NO: 247 |
| WP_031669209.1 | type II CRISPR RNA-guided endonuclease Cas9 [Listeria monocytogenes] SEQ ID NO: 248 |
| WP_033920898.1 | type II CRISPR RNA-guided endonuclease Cas9 [Listeria monocytogenes] SEQ ID NO: 249 |
| AKI42028.1 | CRISPR-associated protein [Listeria monocytogenes] SEQ ID NO: 250 |
| AKI50529.1 | CRISPR-associated protein [Listeria monocytogenes] SEQ ID NO: 251 |
| EFR83390.1 | crispr-associated protein Csn1 [Listeria monocytogenes FSL F2-208] SEQ ID NO: 252 |
| WP_046323366.1 | type II CRISPR RNA-guided endonuclease Cas9 [Listeria seeligeri] SEQ ID NO: 253 |
| AKE81011 .1 | Cas9 [Plant multiplex genome editing vector pYLCRISPR/Cas9Pubi-H] SEQ ID NO: 254 |
| CUO82355.1 | Uncharacterized protein conserved in bacteria [Roseburia hominis] SEQ ID NO: 255 |
| WP_033162887.1 | type II CRISPR RNA-guided endonuclease Cas9 [Sharpea azabuensis] SEQ ID NO: 256 |
| AGZ01981.1 | Cas9 endonuclease [synthetic construct] SEQ ID NO: 257 |
| AKA60242.1 | nuclease deficient Cas9 [synthetic construct] SEQ ID NO: 258 |
| AKS40380.1 | Cas9 [Synthetic plasmid pFC330] SEQ ID NO: 259 |
| 4UN5_B | Cas9, Chain B, Crystal Structure SEQ ID NO: 260 |

[0313] Non-limiting examples of suitable deaminase domains are provided.

Human AID
(SEQ ID NO: 303)
MDSLLMNRRKFLYQFKNVRWAKGRRETYLCYVVKRRDSATSFSLDFGYL
RNKNGCHVELLFLRYISDWDLDPGRCYRVTWFTSWSPCYDCARHVADFL
RGNPNLSLRIFTARLYFCEDRKAEPEGLRRLHRAGVQIAIMTFKDYFYC
WNTFVENHERTFKAWEGLHENSVRLSRQLRRILLPLYEVDDLRDAFRTL
GL
(underline: nuclear localization signal;
double underline: nuclear export signal)
Mouse AID
(SEQ ID NO: 271)
MDSLLMKQKKFLYHFKNVRWAKGRHETYLCYVVKRRDSATSCSLDFGHL
RNKSGCHVELLFLRYISDWDLDPGRCYRVTWFTSWSPCYDCARHVAEFL
RWNPNLSLRIFTARLYFCEDRKAEPEGLRRLHRAGVQIGIMTFKDYFYC
WNTFVENRERTFKAWEGLHENSVRLTRQLRRILLPLYEVDDLRDAFRML
GF
(underline: nuclear localization signal;
double underline: nuclear export signal)
Dog AID
(SEQ ID NO: 272)
MDSLLMKQRKFLYHFKNVRWAKGRHETYLCYVVKRRDSATSFSLDFGHL
RNKSGCHVELLFLRYISDWDLDPGRCYRVTWFTSWSPCYDCARHVADFL
RGYPNLSLRIFAARLYFCEDRKAEPEGLRRLHRAGVQIAIMTFKDYFYC
WNTFVENREKTFKAWEGLHENSVRLSRQLRRILLPLYEVDDLRDAFRTL
GL
(underline: nuclear localization signal;
double underline: nuclear export signal)
Bovine AID
(SEQ ID NO: 273)
MDSLLKKQRQFLYQFKNVRWAKGRHETYLCYVVKRRDSPTSFSLDFGHL
RNKAGCHVELLFLRYISDWDLDPGRCYRVTWFTSWSPCYDCARHVADFL
RGYPNLSLRIFTARLYFCDKERKAEPEGLRRLHRAGVQIAIMTFKDYFY
CWNTFVENHERTFKAWEGLHENSVRLSRQLRRILLPLYEVDDLRDAFRT
LGL
(underline: nuclear localization signal;
double underline: nuclear export signal)
Rat AID
(SEQ ID NO: 1072)
MAVGSKPKAALVGPHWERERIWCFLCSTGLGTQQTGQTSRWLRPAATQD
PVSPPRSLLMKQRKFLYHFKNVRWAKGRHETYLCYVVKRRDSATSFSLD
FGYLRNKSGCHVELLFLRYISDWDLDPGRCYRVTWFTSWSPCYDCARHV
ADFLRGNPNLSLRIFTARLTGWGALPAGLMSPARPSDYFYCWNTFVENH
ERTFKAWEGLHENSVRLSRRLRRILLPLYEVDDLRDAFRTLGL
Mouse APOBEC-3
(SEQ ID NO: 274)
MGPFCLGCSHRKCYSPIRNLISQETFKFHFKNLGYAKGRKDTFLCYEVT
RKDCDSPVSLHHGVFKNKDNIHAEICFLYWFHDKVLKVLSPREEFKITW
YMSWSPCFECAEQIVRFLATHHNLSLDIFSSRLYNVQDPETQQNLCRLV
QEGAQVAAMDLYEFKKCWKKFVDNGGRRFRPWKRLLTNFRYQDSKLQEI
LRPCYIPVPSSSSSTLSNICLTKGLPETRFCVEGRRMDPLSEEEFYSQF
YNQRVKHLCYYHRMKPYLCYQLEQFNGQAPLKGCLLSEKGKQHAEILFL
DKIRSMELSQVTITCYLTWSPCPNCAWQLAAFKRDRPDLILHIYTSRLY
FHWKRPFQKGLCSLWQSGILVDVMDLPQFTDCWTNFVNPKRPFWPWKGL
EIISRRTQRRLRRIKESWGLQDLVNDFGNLQLGPPMS
(italic: nucleic acid editing domain)
Rat APOBEC-3
(SEQ ID NO: 275)
MGPFCLGCSHRKCYSPIRNLISQETFKFHFKNLRYAIDRKDTFLCYEVT
RKDCDSPVSLHHGVFKNKDNIHAEICFLYWFHDKVLKVLSPREEFKITW
YMSWSPCFECAEQVLRFLATHHNLSLDIFSSRLYNIRDPENQQNLCRLV
QEGAQVAAMDLYEFKKCWKKFVDNGGRRFRPWKKLLTNFRYQDSKLQEI
LRPCYIPVPSSSSSTLSNICLTKGLPETRFCVERRRVHLLSEEEFYSQF
YNQRVKHLCYYHGVKPYLCYQLEQFNGQAPLKGCLLSEKGKQHAEILFL
DKIRSMELSQVIITCYLTWSPCPNCAWQLAAFKRDRPDLILHIYTSRLY
FHWKRPFQKGLCSLWQSGILVDVMDLPQFTDCWTNFVNPKRPFWPWKGL
EIISRRTQRRLHRIKESWGLQDLVNDFGNLQLGPPMS
(italic: nucleic acid editing domain)
Rhesus macaque APOBEC-3G
(SEQ ID NO: 276)
MVEPMDPRTFVSNFNNRPILSGLNTVWLCCEVKTKDPSGPPLDAKIFQG
KVYSKAKYHPEMRFLRWFHKWRQLHHDQEYKVTWYVSWSPCTRCANSVA
TFLAKDPKVTLTIFVARLYYFWKPDYQQALRILCQKRGGPHATMKIMNY
NEFQDCWNKFVDGRGKPFKPRNNLPKHYTLLQATLGELLRHLMDPGTFT
SNFNNKPWVSGQHETYLCYKVERLHNDTWVPLNQHRGFLRNQAPNIHGF
PKGRHAELCFLDLIPFWKLDGQQYRVTCFTSWSPCFSCAQEMAKFISNN
EHVSLCIFAARIYDDQGRYQEGLRALHRDGAKIAMMNYSEFEYCWDTFV
DRQGRPFQPWDGLDEHSQALSGRLRAI
(italic: nucleic acid editing domain;
underline: cytoplasmic localization signal)
Chimpanzee APOBEC-3G
(SEQ ID NO: 277)
MKPHFRNPVERMYQDTFSDNFYNRPILSHRNTVWLCYEVKTKGPSRPPL
DAKIFRGQVYSKLKYHPEMRFFHWFSKWRKLHRDQEYEVTWYISWSPCT
KCTRDVATFLAEDPKVTLTIFVARLYYFWDPDYQEALRSLCQKRDGPRA
TMKIMNYDEFQHCWSKFVYSQRELFEPWNNLPKYYILLHIMLGEILRHS
MDPPTFTSNFNNELWVRGRHETYLCYEVERLHNDTWVLLNQRRGFLCNQ
APHKHGFLEGRHAELCFLDVIPFWKLDLHQDYRVTCFTSWSPCFSCAQE
MAKFISNNKHVSLCIFAARIYDDQGRCQEGLRTLAKAGAKISIMTYSEF
KHCWDTFVDHQGCPFQPWDGLEEHSQALSGRLRAILQNQGN
(italic: nucleic acid editing domain; underline:
cytoplasmic localization signal)
Green monkey APOBEC-3G
(SEQ ID NO: 278)
MNPQIRNMVEQMEPDIFVYYFNNRPILSGRNTVWLCYEVKTKDPSGPPL
DANIFQGKLYPEAKDHPEMKFLHWFRKWRQLHRDQEYEVTWYVSWSPCT
RCANSVATFLAEDPKVTLTIFVARLYYFWKPDYQQALRILCQERGGPHA
TMKIMNYNEFQHCWNEFVDGQGKPFKPRKNLPKHYTLLHATLGELLRHV
MDPGTFTSNFNNKPWVSGQRETYLCYKVERSHNDTWVLLNQHRGFLRNQ
APDRHGFPKGRHAELCFLDLIPFWKLDDQQYRVTCFTSWSPCFSCAQKM
AKFISNNKHVSLCIFAARIYDDQGRCQEGLRTLHRDGAKIAVMNYSEFE
YCWDTFVDRQGRPFQPWDGLDEHSQALSGRLRAI
(italic: nucleic acid editing domain; underline:
cytoplasmic localization signal)
Human APOBEC-3G
(SEQ ID NO: 279)
MKPHFRNTVERMYRDTFSYNFYNRPILSRRNTVWLCYEVKTKGPSRPPL
DAKIFRGQVYSELKYHPEMRFFHWFSKWRKLHRDQEYEVTWYISWSPCT
KCTRDMATFLAEDPKVTLTIFVARLYYFWDPDYQEALRSLCQKRDGPRA
TMKIMNYDEFQHCWSKFVYSQRELFEPWNNLPKYYILLHIMLGEILRHS
MDPPTFTFNFNNEPWVRGRHETYLCYEVERMHNDTWVLLNQRRGFLCNQ
APHKHGFLEGRHAELCFLDVIPFWKLDLDQDYRVTCFTSWSPCFSCAQE
MAKFISKNKHVSLCIFTARIYDDQGRCQEGLRTLAEAGAKISIMTYSEF
KHCWDTFVDHQGCPFQPWDGLDEHSQDLSGRLRAILQNQEN
(italic: nucleic acid editing domain; underline:
cytoplasmic localization signal)
Human APOBEC-3F
(SEQ ID NO: 280)
MKPHFRNTVERMYRDTFSYNFYNRPILSRRNTVWLCYEVKTKGPSRPRL
DAKIFRGQVYSQPEHHAEMCFLSWFCGNQLPAYKCFQITWFVSWTPCPD
CVAKLAEFLAEHPNVTLTISAARLYYYWERDYRRALCRLSQAGARVKIM
DDEEFAYCWENFVYSEGQPFMPWYKFDDNYAFLHRTLKEILRNPMEAMY
PHIFYFHFKNLRKAYGRNESWLCFTMEVVKHHSPVSWKRGVFRNQVDPE
THCHAERCFLSWFCDDILSPNTNYEVTWYTSWSPCPECAGEVAEFLARH
SNVNLTIFTARLYYFWDTDYQEGLRSLSQEGASVEIMGYKDFKYCWENF
VYNDDEPFKPWKGLKYNFLFLDSKLQEILE
(italic: nucleic acid editing domain)
Human APOBEC-3B
(SEQ ID NO: 281)
MNPQIRNPMERMYRDTFYDNFENEPILYGRSYTWLCYEVKIKRGRSNLL
WDTGVFRGQVYFKPQYHAEMCFLSWFCGNQLPAYKCFQITWFVSWTPCP
DCVAKLAEFLSEHPNVTLTISAARLYYYWERDYRRALCRLSQAGARVTI
MDYEEFAYCWENFVYNEGQQFMPWYKFDENYAFLHRTLKEILRYLMDPD
TFTFNFNNDPLVLRRRQTYLCYEVERLDNGTWVLMDQHMGFLCNEAKNL
LCGFYGRHAELRFLDLVPSLQLDPAQIYRVTWFISWSPCFSWGCAGEVR
AFLQENTHVRLRIFAARIYDYDPLYKEALQMLRDAGAQVSIMTYDEFEY
CWDTFVYRQGCPFQPWDGLEEHSQALSGRLRAILQNQGN
(italic: nucleic acid editing domain)
Rat APOBEC-3B:
(SEQ ID NO: 1073)
MQPQGLGPNAGMGPVCLGCSHRRPYSPIRNPLKKLYQQTFYFHFKNVRY
AWGRKNNFLCYEVNGMDCALPVPLRQGVFRKQGHIHAELCFIYWFHDKV
LRVLSPMEEFKVTWYMSWSPCSKCAEQVARFLAAHRNLSLAIFSSRLYY
YLRNPNYQQKLCRLIQEGVHVAAMDLPEFKKCWNKFVDNDGQPFRPWMR
LRINFSFYDCKLQEIFSRMNLLREDVFYLQFNNSHRVKPVQNRYYRRKS
YLCYQLERANGQEPLKGYLLYKKGEQHVEILFLEKMRSMELSQVRITCY
LTWSPCPNCARQLAAFKKDHPDLILRIYTSRLYFYWRKKFQKGLCTLWR
SGIHVDVMDLPQFADCWTNFVNPQRPFRPWNELEKNSWRIQRRLRRIKE
SWGL
Bovine APOBEC-3B:
(SEQ ID NO: 1074)
DGWEVAFRSGTVLKAGVLGVSMTEGWAGSGHPGQGACVWTPGTRNTMNL
LREVLFKQQFGNQPRVPAPYYRRKTYLCYQLKQRNDLTLDRGCFRNKKQ
RHAEIRFIDKINSLDLNPSQSYKIICYITWSPCPNCANELVNFITRNNH
LKLEIFASRLYFHWIKSFKMGLQDLQNAGISVAVMTHTEFEDCWEQFVD
NQSRPFQPWDKLEQYSASIRRRLQRILTAPI
Chimpanzee APOBEC-3B:
(SEQ ID NO: 1075)
MNPQIRNPMEWMYQRTFYYNFENEPILYGRSYTWLCYEVKIRRGHSNLL
WDTGVFRGQMYSQPEHHAEMCFLSWFCGNQLSAYKCFQITWFVSWTPCP
DCVAKLAKFLAEHPNVTLTISAARLYYYWERDYRRALCRLSQAGARVKI
MDDEEFAYCWENFVYNEGQPFMPWYKFDDNYAFLHRTLKEIIRHLMDPD
TFTFNFNNDPLVLRRHQTYLCYEVERLDNGTWVLMDQHMGFLCNEAKNL
LCGFYGRHAELRFLDLVPSLQLDPAQIYRVTWFISWSPCFSWGCAGQVR
AFLQENTHVRLRIFAARIYDYDPLYKEALQMLRDAGAQVSIMTYDEFEY
CWDTFVYRQGCPFQPWDGLEEHSQALSGRLRAILQVRASSLCMVPHRPP
PPPQSPGPCLPLCSEPPLGSLLPTGRPAPSLPFLLTASFSFPPPASLPP
LPSLSLSPGHLPVPSFHSLTSCSIQPPCSSRIRETEGWASVSKEGRDLG
Human APOBEC-3C:
(SEQ ID NO: 282)
MNPQIRNPMKAMYPGTFYFQFKNLWEANDRNETWLCFTVEGIKRRSVVS
WKTGVFRNQVDSETHCHAERCFLSWFCDDILSPNTKYQVTWYTSWSPCP
DCAGEVAEFLARHSNVNLTIFTARLYYFQYPCYQEGLRSLSQEGVAVEI
MDYEDFKYCWENFVYNDNEPFKPWKGLKTNFRLLKRRLRESLQ
(italic: nucleic acid editing domain)
Gorilla APOBEC-3C:
(SEQ ID NO: 1076)
MNPQIRNPMKAMYPGTFYFQFKNLWEANDRNETWLCFTVEGIKRRSVVS
WKTGVFRNQVDSETHCHAERCFLSWFCDDILSPNTNYQVTWYTSWSPCP
ECAGEVAEFLARHSNVNLTIFTARLYYFQDTDYQEGLRSLSQEGVAVKI
MDYKDFKYCWENFVYNDDEPFKPWKGLKYNFRFLKRRLQEILE
Human APOBEC-3A:
(SEQ ID NO: 283)
MEASPASGPRHLMDPHIFTSNFNNGIGRHKTYLCYEVERLDNGTSVKMD
QHRGFLHNQAKNLLCGFYGRHAELRFLDLVPSLQLDPAQIYRVTWFISW
SPCFSWGCAGEVRAFLQENTHVRLRIFAARIYDYDPLYKEALQMLRDAG
AQVSIMTYDEFKHCWDTFVDHQGCPFQPWDGLDEHSQALSGRLRAILQN
QGN
(italic: nucleic acid editing domain)
Rhesus macaque APOBEC-3A:
(SEQ ID NO: 1077)
MDGSPASRPRHLMDPNTFTFNFNNDLSVRGRHQTYLCYEVERLDNGTWV
PMDERRGFLCNKAKNVPCGDYGCHVELRFLCEVPSWQLDPAQTYRVTWF
ISWSPCFRRGCAGQVRVFLQENKHVRLRIFAARIYDYDPLYQEALRTLR
DAGAQVSIMTYEEFKHCWDTFVDRQGRPFQPWDGLDEHSQALSGRLRAI
LQNQGN
Bovine APOBEC-3A:
(SEQ ID NO: 1078)
MDEYTFTENFNNQGWPSKTYLCYEMERLDGDATIPLDEYKGFVRNKGLD
QPEKPCHAELYFLGKIHSWNLDRNQHYRLTCFISWSPCYDCAQKLTTFL
KENHHISLHILASRIYTHNRFGCHQSGLCELQAAGARITIMTFEDFKHC
WETFVDHKGKPFQPWEGLNVKSQALCTELQAILKTQQN
Human APOBEC-3H:
(SEQ ID NO: 284)
MALLTAETFRLQFNNKRRLRRPYYPRKALLCYQLTPQNGSTPTRGYFEN
KKKCHAEICFINEIKSMGLDETQCYQVTCYLTWSPCSSCAWELVDFIKA
HDHLNLGIFASRLYYHWCKPQQKGLRLLCGSQVPVEVMGFPKFADCWEN
FVDHEKPLSFNPYKMLEELDKNSRAIKRRLERIKIPGVRAQGRYMDILC
DAEV
(italic: nucleic acid editing domain)
Rhesus macaque APOBEC-3H:
(SEQ ID NO: 1079)
MALLTAKTFSLQFNNKRRVNKPYYPRKALLCYQLTPQNGSTPTRGHLKN
KKKDHAEIRFINKIKSMGLDETQCYQVTCYLTWSPCPSCAGELVDFIKA
HRHLNLRIFASRLYYHWRPNYQEGLLLLCGSQVPVEVMGLPEFTDCWEN
FVDHKEPPSFNPSEKLEELDKNSQAIKRRLERIKSRSVDVLENGLRSLQ
LGPVTPSSSIRNSR
Human APOBEC-3D
(SEQ ID NO: 285)
MNPQIRNPMERMYRDTFYDNFENEPILYGRSYTWLCYEVKIKRGRSNLL
WDTGVFRGPVLPKRQSNHRQEVYFRFENHAEMCFLSWFCGNRLPANRRF
QITWFVSWNPCLPCVVKVTKFLAEHPNVTLTISAARLYYYRDRDWRWVL
LRLHKAGARVKIMDYEDFAYCWENFVCNEGQPFMPWYKFDDNYASLHRT
LKEILRNPMEAMYPHIFYFHFKNLLKACGRNESWLCFTMEVTKHHSAVF
RKRGVFRNQVDPETHCHAERCFLSWFCDDILSPNTNYEVTWYTSWSPCP
ECAGEVAEFLARHSNVNLTIFTARLCYFWDTDYQEGLCSLSQEGASVKI
MGYKDFVSCWKNFVYSDDEPFKPWKGLQTNFRLLKRRLREILQ
(italic: nucleic acid editing domain)
Human APOBEC-1
(SEQ ID NO: 286)
MTSEKGPSTGDPTLRRRIEPWEFDVFYDPRELRKEACLLYEIKWGMSRK
IWRSSGKNTTNHVEVNFIKKFTSERDFHPSMSCSITWFLSWSPCWECSQ
AIREFLSRHPGVTLVIYVARLFWHMDQQNRQGLRDLVNSGVTIQIMRAS
EYYHCWRNFVNYPPGDEAHWPQYPPLWMMLYALELHCIILSLPPCLKIS
RRWQNHLTFFRLHLQNCHYQTIPPHILLATGLIHPSVAWR
Mouse APOBEC-1
(SEQ ID NO: 287)
MSSETGPVAVDPTLRRRIEPHEFEVFFDPRELRKETCLLYEINWGGRHS
VWRHTSQNTSNHVEVNFLEKFTTERYFRPNTRCSITWFLSWSPCGECSR
AITEFLSRHPYVTLFIYIARLYHHTDQRNRQGLRDLISSGVTIQIMTEQ
EYCYCWRNFVNYPPSNEAYWPRYPHLWVKLYVLELYCIILGLPPCLKIL
RRKQPQLTFFTITLQTCHYQRIPPHLLWATGLK
Rat APOBEC-1
(SEQ ID NO: 288)
[sequence omitted]
Human APOBEC-2:
(SEQ ID NO: 1080)
MAQKEEAAVATEAASQNGEDLENLDDPEKLKELIELPPFEIVTGERLPA
NFFKFQFRNVEYSSGRNKTFLCYVVEAQGKGGQVQASRGYLEDEHAAAH
AEEAFFNTILPAFDPALRYNVTWYVSSSPCAACADRIIKTLSKTKNLRL
LILVGRLFMWEEPEIQAALKKLKEAGCKLRIMKPQDFEYVWQNFVEQEE
GESKAFQPWEDIQENFLYYEEKLADILK
Mouse APOBEC-2:
(SEQ ID NO: 1081)
MAQKEEAAEAAAPASQNGDDLENLEDPEKLKELIDLPPFEIVTGVRLPV
NFFKFQFRNVEYSSGRNKTFLCYVVEVQSKGGQAQATQGYLEDEHAGAH
AEEAFFNTILPAFDPALKYNVTWYVSSSPCAACADRILKTLSKTKNLRL
LILVSRLFMWEEPEVQAALKKLKEAGCKLRIMKPQDFEYIWQNFVEQEE
GESKAFEPWEDIQENFLYYEEKLADILK
Rat APOBEC-2:
(SEQ ID NO: 1082)
MAQKEEAAEAAAPASQNGDDLENLEDPEKLKELIDLPPFEIVTGVRLPV
NFFKFQFRNVEYSSGRNKTFLCYVVEAQSKGGQVQATQGYLEDEHAGAH
AEEAFFNTILPAFDPALKYNVTWYVSSSPCAACADRILKTLSKTKNLRL
LILVSRLFMWEEPEVQAALKKLKEAGCKLRIMKPQDFEYLWQNFVEQEE
GESKAFEPWEDIQENFLYYEEKLADILK
Bovine APOBEC-2:
(SEQ ID NO: 1083)
MAQKEEAAAAAEPASQNGEEVENLEDPEKLKELIELPPFEIVTGERLPA
HYFKFQFRNVEYSSGRNKTFLCYVVEAQSKGGQVQASRGYLEDEHATNH
AEEAFFNSIMPTFDPALRYMVTWYVSSSPCAACADRIVKTLNKTKNLRL
LILVGRLFMWEEPEIQAALRKLKEAGCRLRIMKPQDFEYIWQNFVEQEE
GESKAFEPWEDIQENFLYYEEKLADILK
Petromyzon marinus CDA1 (pmCDA1)
(SEQ ID NO: 289)
MTDAEYVRIHEKLDIYTFKKQFFNNKKSVSHRCYVLFELKRRGERRACF
WGYAVNKPQSGTERGIHAEIFSIRKVEEYLRDNPGQFTINWYSSWSPCA
DCAEKILEWYNQELRGNGHTLKIWACKLYYEKNARNQIGLWNLRDNGVG
LNVMVSEHYQCCRKIFIQSSHNQLNENRWLEKTLKRAEKRRSELSIMIQ
VKILHTTKSPAV
Human APOBEC3G D316R_D317R
(SEQ ID NO: 290)
MKPHFRNTVERMYRDTFSYNFYNRPILSRRNTVWLCYEVKTKGPSRPPL
DAKIFRGQVYSELKYHPEMRFFHWFSKWRKLHRDQEYEVTWYISWSPCT
KCTRDMATFLAEDPKVTLTIFVARLYYFWDPDYQEALRSLCQKRDGPRA
TMKIMNYDEFQHCWSKFVYSQRELFEPWNNLPKYYILLHIMLGEILRHS
MDPPTFTFNFNNEPWVRGRHETYLCYEVERMHNDTWVLLNQRRGFLCNQ
APHKHGFLEGRHAELCFLDVIPFWKLDLDQDYRVTCFTSWSPCFSCAQE
MAKFISKNKHVSLCIFTARIYRRQGRCQEGLRTLAEAGAKISIMTYSEF
KHCWDTFVDHQGCPFQPWDGLDEHSQDLSGRLRAILQNQEN
Human APOBEC3G chain A
(SEQ ID NO: 291)
MDPPTFTFNFNNEPWVRGRHETYLCYEVERMHNDTWVLLNQRRGFLCNQ
APHKHGFLEGRHAELCFLDVIPFWKLDLDQDYRVTCFTSWSPCFSCAQE
MAKFISKNKHVSLCIFTARIYDDQGRCQEGLRTLAEAGAKISIMTYSEF
KHCWDTFVDHQGCPFQPWDGLDEHSQDLSGRLRAILQ
Human APOBEC3G chain A D120R_D121R
(SEQ ID NO: 292)
MDPPTFTFNFNNEPWVRGRHETYLCYEVERMHNDTWVLLNQRRGFLCNQ
APHKHGFLEGRHAELCFLDVIPFWKLDLDQDYRVTCFTSWSPCFSCAQE
MAKFISKNKHVSLCIFTARIYRRQGRCQEGLRTLAEAGAKISIMTYSEF
KHCWDTFVDHQGCPFQPWDGLDEHSQDLSGRLRAILQ

[0314] Non-limiting examples of fusion proteins/nucleobase editors are provided. His6-rAPOBEC1-XTEN-dCas9 for Escherichia coli expression (SEQ ID NO: 293)

His6-rAPOBEC1-XTEN-dCas9 for Escherichia coli expression
(SEQ ID NO: 293)
MGSSHHHHHHMSSETGPVAVDPTLRRRIEPHEFEVFFDPRELRKETCLLYEINWGGRHSIWRHTSQNTNKH
VEVNFIEKFTTERYFCPNTRCSITWFLSWSPCGECSRAITEFLSRYPHVTLFIYIARLYHHADPRNRQGLRDLI
SSGVTIQIMTEQESGYCWRNFVNYSPSNEAHWPRYPHLWVRLYVLELYCIILGLPPCLNILRRKQPQLTFFTI
ALQSCHYQRLPPHILWATGLKSGSETPGTSESATPESDKKYSIGLAIGTNSVGWAVITDEYKVPSKKFKVLG
NTDRHSIKKNLIGALLFDSGETAEATRLKRTARRRYTRRKNRICYLQEIFSNEMAKVDDSFFHRLEESFLVE
EDKKHERHPIFGNIVDEVAYHEKYPTIYHLRKKLVDSTDKADLRLIYLALAHMIKFRGHFLIEGDLNPDNSD
VDKLFIQLVQTYNQLFEENPINASGVDAKAILSARLSKSRRLENLIAQLPGEKKNGLFGNLIALSLGLTPNFK
SNFDLAEDAKLQLSKDTYDDDLDNLLAQIGDQYADLFLAAKNLSDAILLSDILRVNTEITKAPLSASMIKRY
DEHHQDLTLLKALVRQQLPEKYKEIFFDQSKNGYAGYIDGGASQEEFYKFIKPILEKMDGTEELLVKLNRE
DLLRKQRTFDNGSIPHQIHLGELHAILRRQEDFYPFLKDNREKIEKILTFRIPYYVGPLARGNSRFAWMTRKS
EETITPWNFEEVVDKGASAQSFIERMTNFDKNLPNEKVLPKHSLLYEYFTVYNELTKVKYVTEGMRKPAFL
SGEQKKAIVDLLFKTNRKVTVKQLKEDYFKKIECFDSVEISGVEDRFNASLGTYHDLLKIIKDKDFLDNEEN
EDILEDIVLTLTLFEDREMIEERLKTYAHLFDDKVMKQLKRRRYTGWGRLSRKLINGIRDKQSGKTILDFLK
SDGFANRNFMQLIHDDSLTFKEDIQKAQVSGQGDSLHEHIANLAGSPAIKKGILQTVKVVDELVKVMGRH
KPENIVIEMARENQTTQKGQKNSRERMKRIEEGIKELGSQILKEHPVENTQLQNEKLYLYYLQNGRDMYVD
QELDINRLSDYDVDAIVPQSFLKDDSIDNKVLTRSDKNRGKSDNVPSEEVVKKMKNYWRQLLNAKLITQR
KFDNLTKAERGGLSELDKAGFIKRQLVETRQITKHVAQILDSRMNTKYDENDKLIREVKVITLKSKLVSDFR
KDFQFYKVREINNYHHAHDAYLNAVVGTALIKKYPKLESEFVYGDYKVYDVRKMIAKSEQEIGKATAKYF
FYSNIMNFFKTEITLANGEIRKRPLIETNGETGEIVWDKGRDFATVRKVLSMPQVNIVKKTEVQTGGFSKESI
LPKRNSDKLIARKKDWDPKKYGGFDSPTVAYSVLVVAKVEKGKSKKLKSVKELLGITIMERSSFEKNPIDF
LEAKGYKEVKKDLIIKLPKYSLFELENGRKRMLASAGELQKGNELALPSKYVNFLYLASHYEKLKGSPEDN
EQKQLFVEQHKHYLDEIIEQISEFSKRVILADANLDKVLSAYNKHRDKPIREQAENIIHLFTLTNLGAPAAFK
YFDTTIDRKRYTSTKEVLDATLIHQSITGLYETRIDLSQLGGDSGGSPKKKRKV
rAPOBEC1-XTEN-dCas9-NLS for Mammalian expression
(SEQ ID NO: 294)
mSSETGPVAVDPTLRRRIEPHEFEVFFDPRELRKETCLLYEINWGGRHSIWRHTSQNTNKHVEVNFIEKFTT
ERYFCPNTRCSITWFLSWSPCGECSRAITEFLSRYPHVTLFIYIARLYHHADPRNRQGLRDLISSGVTIQIMTE
QESGYCWRNFVNYSPSNEAHWPRYPHLWVRLYVLELYCIILGLPPCLNILRRKQPQLTFFTIALQSCHYQRL
PPHILWATGLKSGSETPGTSESATPESDKKYSIGLAIGTNSVGWAVITDEYKVPSKKFKVLGNTDRHSIKKN
LIGALLFDSGETAEATRLKRTARRRYTRRKNRICYLQEIFSNEMAKVDDSFFHRLEESFLVEEDKKHERHPIF
GNIVDEVAYHEKYPTIYHLRKKLVDSTDKADLRLIYLALAHMIKFRGHFLIEGDLNPDNSDVDKLFIQLVQT
YNQLFEENPINASGVDAKAILSARLSKSRRLENLIAQLPGEKKNGLFGNLIALSLGLTPNFKSNFDLAEDAKL
QLSKDTYDDDLDNLLAQIGDQYADLFLAAKNLSDAILLSDILRVNTEITKAPLSAMIKRYDEHHQDLTLLK
ALVRQQLPEKYKEIFFDQSKNGYAGYIDGGASQEEFYKFIKPILEKMDGTEELLVKLNREDLLRKQRTFDN
GSIPHQIHLGELHAILRRQEDFYPFLKDNREKIEKILTFRIPYYVGPLARGNSRFAWMTRKSEETITPWNFEEV
VDKGASAQSFIERMTNFDKNLPNEKVLPKHSLLYEYFTVYNELTKVKYVTEGMRKPAFLSGEQKKAIVDL
LFKTNRKVTVKQLKEDYFKKIECFDSVEISGVEDRFNASLGTYHDLLKIIKDKDFLDNEENEDILEDIVLTLT
LPEDREMIEERLKTYAHLFDDKVMKQLKRRRYTGWGRLSRKLINGIRDKQSGKTILDFLKSDGFANRNFM
QLIHDDSLTFKEDIQKAQVSGQGDSLHEHIANLAGSPAIKKGILQTVKVVDELVKVMGRHKPENIVIEMARE
NQTTQKGQKNSRERMKRIEEGIKELGSQILKEHPVENTQLQNEKLYLYYLQNGRDMYVDQELDINRLSDY
DVDAIVPQSFLKDDSIDNKVLTRSDKNRGKSDNVPSEEVVKKMKNYWRQLLNAKLITQRKFDNLTKAERG
GLSELDKAGFIKRQLVETRQITKHVAQILDSRMNTKYDENDKLIREVKVITLKSKLVSDFRKDFQFYKVREI
NNYHHAHDAYLNAVVGTALIKKYPKLESEFVYGDYKVYDVRKMIAKSEQEIGKATAKYFFYSNIMNFFKT
EITLANGEIRKRPLIETNGETGEIVWDKGRDFATVRKVLSMPQVNIVKKTEVQTGGFSKESILPKRNSDKLIA
RKKDWDPKKYGGFDSPTVAYSVLVVAKVEKGKSKKLKSVKELLGITIMERSSFEKNPIDFLEAKGYKEVK
KDLIIKLPKYSLFELENGRKRMLASAGELQKGNELALPSKYVNFLYLASHYEKLKGSPEDNEQKQLFVEQH
KHYLDEIIEQISEFSKRVILADANLDKVLSAYNKHRDKPIREQAENIIHLFTLTNLGAPAAFKYFDTTIDRKRY
TSTKEVLDATLIHQSITGLYETRIDLSQLGGDSGGSPKKKRKV
hAPOBEC1-XTEN-dCas9-NLS for Mammalian expression
(SEQ ID NO: 295)
MTSEKGPSTGDPTLRRRIEPWEFDVFYDPRELRKEACLLYEIKWGMSRKIWRSSGKNTTNHVEVNFIKKFTSE
RDFHPSMSCSITWFLSWSPCWECSQAIREFLSRHPGVTLVIYVARLFWHMDQQNRQGLRDLVNSGVTIQI
MRASEYYHCWRNFVNYPPGDEAHWPQYPPLWMMLYALELHCIILSLPPCLKISRRWQNHLTFFRLHLQNC
HYQTIPPHILLATGLIHPSVAWRSGSETPGTSESATPESDKKYSIGLAIGTNSVGWAVITDEYKVPSKKFKVLGN
TDRHSIKKNLIGALLFDSGETAEATRLKRTARRRYTRRKNRICYLQEIFSNEMAKVDDSFFHRLEESFLVEEDKK
HERHPIFGNIVDEVAYHEKYPTIYHLRKKLVDSTDKADLRLIYLALAHMIKFRGHFLIEGDLNPDNSDVDKLFIQ
LVQTYNQLFEENPINASGVDAKAILSARLSKSRRLENLIAQLPGEKKNGLFGNLIALSLGLTPNFKSNFDLAEDA
KLQLSKDTYDDDLDNLLAQIGDQYADLFLAAKNLSDAILLSDILRVNTEITKAPLSASMIKRYDEHHQDLTLLKA
LVRQQLPEKYKEIFFDQSKNGYAGYIDGGASQEEFYKFIKPILEKMDGTEELLVKLNREDLLRKQRTFDNGSIPH
QIHLGELHAILRRQEDFYPFLKDNREKIEKILTFRIPYYVGPLARGNSRFAWMTRKSEETITPWNFEEVVDKGA
SAQSFIERMTNFDKNLPNEKVLPKHSLLYEYFTVYNELTKVKYVTEGMRKPAFLSGEQKKAIVDLLFKTNRKVT
VKQLKEDYFKKIECFDSVEISGVEDRFNASLGTYHDLLKIIKDKDFLDNEENEDILEDIVLTLTLFEDREMIEER
LKTYAHLFDDKVMKQLKRRRYTGWGRLSRKLINGIRDKQSGKTILDFLKSDGFANRNFMQLIHDDSLTFKEDIQK
AQVSGQGDSLHEHIANLAGSPAIKKGILQTVKVVDELVKVMGRHKPENIVIEMARENQTTQKGQKNSRERM
KRIEEGIKELGSQILKEHPVENTQLQNEKLYLYYLQNGRDMYVDQELDINRLSDYDVDAIVPQSFLKDDSIDNK
VLTRSDKNRGKSDNVPSEEVVKKMKNYWRQLLNAKLITQRKFDNLTKAERGGLSELDKAGFIKRQLVETRQIT
KHVAQILDSRMNTKYDENDKLIREVKVITLKSKLVSDFRKDFQFYKVREINNYHHAHDAYLNAVVGTALIKKYP
KLESEFVYGDYKVYDVRKMIAKSEQEIGKATAKYFFYSNIMNFFKTEITLANGEIRKRPLIETNGETGEIVWDKG
RDFATVRKVLSMPQVNIVKKTEVQTGGFSKESILPKRNSDKLIARKKDWDPKKYGGFDSPTVAYSVLVVAKVE
KGKSKKLKSVKELLGITIMERSSFEKNPIDFLEAKGYKEVKKDLIIKLPKYSLFELENGRKRMLASAGELQKGNEL
ALPSKYVNFLYLASHYEKLKGSPEDNEQKQLFVEQHKHYLDEIIEQISEFSKRVILADANLDKVLSAYNKHRDKPI
REQAENIIHLFTLTNLGAPAAFKYFDTTIDRKRYTSTKEVLDATLIHQSITGLYETRIDLSQLGGDSGGSPKKKRK
V
rAPOBEC1-XTEN-dCas9-UGI-NLS
(SEQ ID NO: 296)
MSSETGPVAVDPTLRRRIEPHEFEVFFDPRELRKETCLLYEINWGGRHSIWRHTSQNTNKHVEVNFIEKFTT
ERYFCPNTRCSITWFLSWSPCGECSRAITEFLSRYPHVTLFIYIARLYHHADPRNRQGLRDLISSGVTIQIMTE
QESGYCWRNFVNYSPSNEAHWPRYPHLWVRLYVLELYCIILGLPPCLNILRRKQPQLTFFTIALQSCHYQRL
PPHILWATGLKSGSETPGTSESATPESDKKYSIGLAIGTNSVGWAVITDEYKVPSKKFKVLGNTDRHSIKKN
LIGALLFDSGETAEATRLKRTARRRYTRRKNRICYLQEIFSNEMAKVDDSFFHRLEESFLVEEDKKHERHPIF
GNIVDEVAYHEKYPTIYHLRKKLVDSTDKADLRLIYLALAHMIKFRGHFLIEGDLNPDNSDVDKLFIQLVQT
YNQLFEENPINASGVDAKAILSARLSKSRRLENLIAQLPGEKKNGLFGNLIALSLGLTPNFKSNFDLAEDAKL
QLSKDTYDDDLDNLLAQIGDQYADLFLAAKNLSDAILLSDILRVNTEITKAPLSASMIKRYDEHHQDLTLLK
ALVRQQLPEKYKEIFFDQSKNGYAGYIDGGASQEEFYKFIKPILEKMDGTEELLVKLNREDLLRKQRTFDN
GSIPHQIHLGELHAILRRQEDFYPFLKDNREKIEKILTFRIPYYVGPLARGNSRFAWMTRKSEETITPWNFEEV
VDKGASAQSFIERMTNFDKNLPNEKVLPKHSLLYEYFTVYNELTKVKYVTEGMRKPAFLSGEQKKAIVDL
LFKTNRKVTVKQLKEDYFKKIECFDSVEISGVEDRFNASLGTYHDLLKIIKDKDFLDNEENEDILEDIVLTLT
LFEDREMIEERLKTYAHLFDDKVMKQLKRRRYTGWGRLSRKLINGIRDKQSGKTILDFLKSDGFANRNFM
QLIHDDSLTFKEDIQKAQVSGQGDSLHEHIANLAGSPAIKKGILQTVKVVDELVKVMGRHKPENIVIEMARE
NQTTQKGQKNSRERMKRIEEGIKELGSQILKEHPVENTQLQNEKLYLYYLQNGRDMYVDQELDINRLSDY
DVDAIVPQSFLKDDSIDNKVLTRSDKNRGKSDNVPSEEVVKKMKNYWRQLLNAKLITQRKFDNLTKAERG
GLSELDKAGFIKRQLVETRQITKHVAQILDSRMNTKYDENDKLIREVKVITLKSKLVSDFRKDFQFYKVREI
NNYHHAHDAYLNAVVGTALIKKYPKLESEFVYGDYKVYDVRKMIAKSEQEIGKATAKYFFYSNIMNFFKT
EITLANGEIRKRPLIETNGETGEIVWDKGRDFATVRKVLSMPQVNIVKKTEVQTGGFSKESILPKRNSDKLIA
RKKDWDPKKYGGFDSPTVAYSVLVVAKVEKGKSKKLKSVKELLGITIMERSSFEKNPIDFLEAKGYKEVK
KDLIIKLPKYSLFELENGRKRMLASAGELQKGNELALPSKYVNFLYLASHYEKLKGSPEDNEQKQLFVEQH
KHYLDEIIEQISEFSKRVILADANLDKVLSAYNKHRDKPIREQAENIIHLFTLTNLGAPAAFKYFDTTIDRKRY
TSTKEVLDATLIHQSITGLYETRIDLSQLGGDSGGSTNLSDIIEKETGKQLVIQESILMLPEEVEEVIGNKPESD
ILVHTAYDESTDENVMLLTSDAPEYKPWALVIQDSNGENKIKMLSGGSPKKKRKV
rAPOBEC1-XTEN-Cas9 nickase-UGI-NLS
(BE3, SEQ ID NO: 297)
MSSETGPVAVDPTLRRRIEPHEFEVFFDPRELRKETCLLYEINWGGRHSIWRHTSQNTNKHVEVNFIEKFTT
ERYFCPNTRCSITWFLSWSPCGECSRAITEFLSRYPHVTLFIYIARLYHHADPRNRQGLRDLISSGVTIQIMTE
QESGYCWRNFVNYSPSNEAHWPRYPHLWVRLYVLELYCIILGLPPCLNILRRKQPQLTFFTIALQSCHYQRL
PPHILWATGLKSGSETPGTSESATPESDKKYSIGLAIGTNSVGWAVITDEYKVPSKKFKVLGNTDRHSIKKN
LIGALLFDSGETAEATRLKRTARRRYTRRKNRICYLQEIFSNEMAKVDDSFFHRLEESFLVEEDKKHERHPIF
GNIVDEVAYHEKYPTIYHLRKKLVDSTDKADLRLIYLALAHMIKFRGHFLIEGDLNPDNSDVDKLFIQLVQT
YNQLFEENPINASGVDAKAILSARLSKSRRLENLIAQLPGEKKNGLFGNLIALSLGLTPNFKSNFDLAEDAKL
QLSKDTYDDDLDNLLAQIGDQYADLFLAAKNLSDAILLSDILRVNTEITKAPLSASMIKRYDEHHQDLTLLK
ALVRQQLPEKYKEIFFDQSKNGYAGYIDGGASQEEFYKFIKPILEKMDGTEELLVKLNREDLLRKQRTFDN
GSIPHQIHLGELHAILRRQEDFYPFLKDNREKIEKILTFRIPYYVGPLARGNSRFAWMTRKSEETITPWNFEEV
VDKGASAQSFIERMTNFDKNLPNEKVLPKHSLLYEYFTVYNELTKVKYVTEGMRKPAFLSGEQKKAIVDL
LFKTNRKVTVKQLKEDYFKKIECFDSVEISGVEDRFNASLGTYHDLLKIIKDKDFLDNEENEDILEDIVLTITL
FEDREMIEERLKTYAHLFDDKVMKQLKRRRYTGWGRLSRKLINGIRDKQSGKTILDFLKSDGFANRNFMQ
LIHDDSLTFKEDIQKAQVSGQGDSLHEHIANLAGSPAIKKGILQTVKVVDELVKVMGRHKPENIVIEMAREN
QTTQKGQKNSRERMKRIEEGIKELGSQILKEHPVENTQLQNEKLYLYYLQNGRDMYVDQELDINRLSDYD
VDHIVPQSFLKDDSIDNKVLTRSDKNRGKSDNVPSEEVVKKMKNYWRQLLNAKLITQRKFDNLTKAERGG
LSELDKAGFIKRQLVETRQITKHVAQILDSRMNTKYDENDKLIREVKVITLKSKLVSDFRKDFQFYKVREIN
NYHHAHDAYLNAVVGTALIKKYPKLESEFVYGDYKVYDVRKMIAKSEQEIGKATAKYFFYSNIMNFFKTE
ITLANGEIRKRPLIETNGETGEIVWDKGRDFATVRKVLSMPQVNIVKKTEVQTGGFSKESILPKRNSDKLIAR
KKDWDPKKYGGFDSPTVAYSVLVVAKVEKGKSKKLKSVKELLGITIMERSSFEKNPIDFLEAKGYKEVKK
DLIIKLPKYSLFELENGRKRMLASAGELQKGNELALPSKYVNFLYLASHYEKLKGSPEDNEQKQLFVEQHK
HYLDEIIEQISEFSKRVILADANLDKVLSAYNKHRDKPIREQAENIIHLFTLTNLGAPAAFKYFDTTIDRKRYT
STKEVLDATLIHQSITGLYETRIDLSQLGGDSGGSTNLSDIIEKETGKQLVIQESILMLPEEVEEVIGNKPESDI
LVHTAYDESTDENVMLLTSDAPEYKPWALVIQDSNGENKIKMLSGGSPKKKRKV
pmCDA1-XTEN-dCas9-UGI (bacteria)
(SEQ ID NO: 298)
MTDAEYVRIHEKLDIYTFKKQFFNNKKSVSHRCYVLFELKRRGERRACFWGYAVNKPQ
SGTERGIHAEIFSIRKVEEYLRDNPGQFTINWYSSWSPCADCAEKILEWYNQELRGNGHT
LKIWACKLYYEKNARNQIGLWNLRDNGVGLNVMVSEHYQCCRKIFIQSSHNQLNENR
WLEKTLKRAEKRRSELSIMIQVKILHTTKSPAVSGSETPGTSESATPESDKKYSIGLAIGT
NSVGWAVITDEYKVPSKKFKVLGNTDRHSIKKNLIGALLFDSGETAEATRLKRTARRRY
TRRKNRICYLQEIFSNEMAKVDDSFFHRLEESFLVEEDKKHERHPIFGNIVDEVAYHEKY
PTIYHLRKKLVDSTDKADLRLIYLALAHMIKFRGHFLIEGDLNPDNSDVDKLFIQLVQTY
NQLFEENPINASGVDAKAILSARLSKSRRLENLIAQLPGEKKNGLFGNLIALSLGLTPNFK
SNFDLAEDAKLQLSKDTYDDDLDNLLAQIGDQYADLFLAAKNLSDAILLSDILRVNTEIT
KAPLSASMIKRYDEHHQDLTLLKALVRQQLPEKYKEIFFDQSKNGYAGYIDGGASQEEF
YKFIKPILEKMDGTEELLVKLNREDLLRKQRTFDNGSIPHQIHLGELHAILRRQEDFYPFL
KDNREKIEKILTFRIPYYVGPLARGNSRFAWMTRKSEETITPWNFEEVVDKGASAQSFIE
RMTNFDKNLPNEKVLPKHSLLYEYFTVYNELTKVKYVTEGMRKPAFLSGEQKKAIVDL
LFKTNRKVTVKQLKEDYFKKIECFDSVETSGVEDRFNASLGTYHDLLKIIKDKDFLDNEE
NEDILEDIVLTLTLFEDREMIEERLKTYAHLFDDKVMKQLKRRRYTGWGRLSRKLINGIR
DKQSGKTILDFLKSDGFANRNFMQLIHDDSLTFKEDIQKAQVSGQGDSLHEHIANLAGSP
AIKKGILQTVKVVDELVKVMGRHKPENIVIEMARENQTTQKGQKNSRERMKRIEEGIKE
LGSQILKEHPVENTQLQNEKLYLYYLQNGRDMYVDQELDINRLSDYDVDAIVPQSFLKD
DSIDNKVLTRSDKNRGKSDNVPSEEVVKKMKNYWRQLLNAKLITQRKFDNLTKAERGG
LSELDKAGFIKRQLVETRQITKHVAQILDSRMNTKYDENDKLIREVKVITLKSKLVSDFR
KDFQFYKVREINNYHHAHDAYLNAVVGTALIKKYPKLESEFVYGDYKVYDVRKMIAKS
EQEIGKATAKYFFYSNIMNFFKTEITLANGEIRKRPLIETNGETGEIVWDKGRDFATVRK
VLSMPQVNIVKKTEVQTGGFSKESILPKRNSDKLIARKKDWDPKKYGGFDSPTVAYSVL
VVAKVEKGKSKKLKSVKELLGITIMERSSFEKNPIDFLEAKGYKEVKKDLIIKLPKYSLFE
LENGRKRMLASAGELQKGNELALPSKYVNFLYLASHYEKLKGSPEDNEQKQLFVEQHK
HYLDEIIEQISEFSKRVILADANLDKVLSAYNKHRDKPIREQAENIIHLFTLTNLGAPAAFK
YFDTTIDRKRYTSTKEVLDATLIHQSITGLYETRIDLSQLGGDSGGSMTNLSDIIEKETGK
QLVIQESILMLPEEVEEVIGNKPESDILVHTAYDESTDENVMLLTSDAPEYKPWALVIQD
SNGENKIKML
pmCDA1-XTEN-nCas9-UGI-NLS (mammalian construct) (SEQ ID NO: 299):
MTDAEYVRIHEKLDIYTFKKQFFNNKKSVSHRCYVLFELKRRGERRACFWGYAVNKPQ
SGTERGIHAEIFSIRKVEEYLRDNPGQFTINWYSSWSPCADCAEKILEWYNQELRGNGHT
LKIWACKLYYEKNARNQIGLWNLRDNGVGLNVMVSEHYQCCRKIFIQSSHNQLNENR
WLEKTLKRAEKRRSELSIMIQVKILHTTKSPAVSGSETPGTSESATPESDKKYSIGLAIGT
NSVGWAVITDEYKVPSKKFKVLGNTDRHSIKKNLIGALLFDSGETAEATRLKRTARRRY
TRRKNRICYLQEIFSNEMAKVDDSFFHRLEESFLVEEDKKHERHPIFGNIVDEVAYHEKY
PTIYHLRKKLVDSTDKADLRLIYLALAHMIKFRGHFLIEGDLNPDNSDVDKLFIQLVQTY
NQLFEENPINASGVDAKAILSARLSKSRRLENLIAQLPGEKKNGLFGNLIALSLGLTPNFK
SNFDLAEDAKLQLSKDTYDDDLDNLLAQIGDQYADLFLAAKNLSDAILLSDILRVNTEIT
KAPLSASMIKRYDEHHQDLTLLKALVRQQLPEKYKEIFFDQSKNGYAGYIDGGASQEEF
YKFIKPILEKMDGTEELLVKLNREDLLRKQRTFDNGSIPHQIHLGELHAILRRQEDFYPFL
KDNREKIEKILTFRIPYYVGPLARGNSRFAWMTRKSEETITPWNFEEVVDKGASAQSFIE
RMTNFDKNLPNEKVLPKHSLLYEYFTVYNELTKVKYVTEGMRKPAFLSGEQKKAIVDL
LFKTNRKVTVKQLKEDYFKKIECFDSVETSGVEDRFNASLGTYHDLLKIIKDKDFLDNEE
NEDILEDIVLTLTLFEDREMIEERLKTYAHLFDDKVMKQLKRRRYTGWGRLSRKLINGIR
DKQSGKTILDFLKSDGFANRNFMQLIHDDSLTFKEDIQKAQVSGQGDSLHEHIANLAGSP
AIKKGILQTVKVVDELVKVMGRHKPENIVIEMARENQTTQKGQKNSRERMKRIEEGIKE
LGSQILKEHPVENTQLQNEKLYLYYLQNGRDMYVDQELDINRLSDYDVDHIVPQSFLKD
DSIDNKVLTRSDKNRGKSDNVPSEEVVKKMKNYWRQLLNAKLITQRKFDNLTKAERGG
LSELDKAGFIKRQLVETRQITKHVAQILDSRMNTKYDENDKLIREVKVITLKSKLVSDFR
KDFQFYKVREINNYHHAHDAYLNAVVGTALIKKYPKLESEFVYGDYKVYDVRKMIAKS
EQEIGKATAKYFFYSNIMNFFKTEITLANGEIRKRPLIETNGETGEIVWDKGRDFATVRK
VLSMPQVNIVKKTEVQTGGFSKESILPKRNSDKLIARKKDWDPKKYGGFDSPTVAYSVL
VVAKVEKGKSKKLKSVKELLGITIMERSSFEKNPIDFLEAKGYKEVKKDLIIKLPKYSLFE
LENGRKRMLASAGELQKGNELALPSKYVNFLYLASHYEKLKGSPEDNEQKQLFVEQHK
HYLDEIIEQISEFSKRVILADANLDKVLSAYNKHRDKPIREQAENIIHLFTLTNLGAPAAFK
YFDTTIDRKRYTSTKEVLDATLIHQSITGLYETRIDLSQLGGDSGGSTNLSDIIEKETGKQL
VIQESILMLPEEVEEVIGNKPESDILVHTAYDESTDENVMLLTSDAPEYKPWALVIQDSN
GENKIKMLSGGSPKKKRKV
huAPOBEC3G-XTEN-dCas9-UGI (bacteria)
(SEQ ID NO: 300)
MDPPTFTFNFNNEPWVRGRHETYLCYEVERMHNDTWVLLNQRRGFLCNQAPHKHGFL
EGRHAELCFLDVIPFWKLDLDQDYRVTCFTSWSPCFSCAQEMAKFISKNKHVSLCIFTAR
IYDDQGRCQEGLRTLAEAGAKISIMTYSEFKHCWDTFVDHQGCPFQPWDGLDEHSQDL
SGRLRAILQSGSETPGTSESATPESDKKYSIGLAIGTNSVGWAVITDEYKVPSKKFKVLG
NTDRHSIKKNLIGALLFDSGETAEATRLKRTARRRYTRRKNRICYLQEIFSNEMAKVDDS
FFHRLEESFLVEEDKKHERHPIFGNIVDEVAYHEKYPTIYHLRKKLVDSTDKADLRLIYL
ALAHMIKFRGHFLIEGDLNPDNSDVDKLFIQLVQTYNQLFEENPINASGVDAKAILSARL
SKSRRLENLIAQLPGEKKNGLFGNLIALSLGLTPNFKSNFDLAEDAKLQLSKDTYDDDLD
NLLAQIGDQYADLFLAAKNLSDAILLSDILRVNTEITKAPLSASMIKRYDEHHQDLTLLK
ALVRQQLPEKYKEIFFDQSKNGYAGYIDGGASQEEFYKFIKPILEKMDGTEELLVKLNRE
DLLRKQRTFDNGSIPHQIHLGELHAILRRQEDFYPFLKDNREKIEKILTFRIPYYVGPLAR
GNSRFAWMTRKSEETITPWNFEEVVDKGASAQSFIERMTNFDKNLPNEKVLPKHSLLYE
YFTVYNELTKVKYVTEGMRKPAFLSGEQKKAIVDLLFKTNRKVTVKQLKEDYFKKIECF
DSVEISGVEDRFNASLGTYHDLLKIIKDKDFLDNEENEDILEDIVLTLTLFEDREMIEERLK
TYAHLFDDKVMKQLKRRRYTGWGRLSRKLINGIRDKQSGKTILDFLKSDGFANRNFMQ
LIHDDSLTFKEDIQKAQVSGQGDSLHEHIANLAGSPAIKKGILQTVKVVDELVKVMGRH
KPENIVIEMARENQTTQKGQKNSRERMKRIEEGIKELGSQILKEHPVENTQLQNEKLYLY
YLQNGRDMYVDQELDINRLSDYDVDAIVPQSFLKDDSIDNKVLTRSDKNRGKSDNVPS
EEVVKKMKNYWRQLLNAKLITQRKFDNLTKAERGGLSELDKAGFIKRQLVETRQITKH
VAQILDSRMNTKYDENDKLIREVKVITLKSKLVSDFRKDFQFYKVREINNYHHAHDAYL
NAVVGTALIKKYPKLESEFVYGDYKVYDVRKMIAKSEQEIGKATAKYFFYSNIMNFFKT
EITLANGEIRKRPLIETNGETGEIVWDKGRDFATVRKVLMPQVNIVKKTEVQTGGFSKE
SILPKRNSDKLIARKKDWDPKKYGGFDSPTVAYSVLVVAKVEKGKSKKLKSVKELLGIT
IMERSSFEKNPIDFLEAKGYKEVKKDLIIKLPKYSLFELENGRKRMLASAGELQKGNELA
LPSKYVNFLYLASHYEKLKGSPEDNEQKQLFVEQHKHYLDEIIEQISEFSKRVILADANL
DKVLSAYNKHRDKPIREQAENIIHLFTLTNLGAPAAFKYFDTTIDRKRYTSTKEVLDATLI
HQSITGLYETRIDLSQLGGDSGGSMTNLSDIIEKETGKQLVIQESILMLPEEVEEVIGNKPE
SDILVHTAYDESTDENVMLLTSDAPEYKPWALVIQDSNGENKIKML
huAPOBEC3G-XTEN-nCas9-UGI-NLS (mammalian construct)
(SEQ ID NO: 301)
MDPPTFTFNFNNEPWVRGRHETYLCYEVERMHNDTWVLLNQRRGFLCNQAPHKHGFL
EGRHAELCFLDVIPFWKLDLDQDYRVTCFTSWSPCFSCAQEMAKFISKNKHVSLCIFTAR
IYDDQGRCQEGLRTLAEAGAKISIMTYSEFKHCWDTFVDHQGCPFQPWDGLDEHSQDL
SGRLRAILQSGSETPGTSESATPESDKKYSIGLAIGTNSVGWAVITDEYKVPSKKFKVLG
NTDRHSIKKNLIGALLFDSGETAEATRLKRTARRRYTRRKNRICYLQEIFSNEMAKVDDS
FFHRLEESFLVEEDKKHERHPIFGNIVDEVAYHEKYPTIYHLRKKLVDSTDKADLRLIYL
ALAHMIKFRGHFLIEGDLNPDNSDVDKLFIQLVQTYNQLFEENPINASGVDAKAILSARL
SKSRRLENLIAQLPGEKKNGLFGNLIALSLGLTPNFKSNFDLAEDAKLQLSKDTYDDDLD
NLLAQIGDQYADLFLAAKNLSDAILLSDILRVNTEITKAPLSASMIKRYDEHHQDLTLLK
ALVRQQLPEKYKEIFFDQSKNGYAGYIDGGASQEEFYKFIKPILEKMDGTEELLVKLNRE
DLLRKQRTFDNGSIPHQIHLGELHAILRRQEDFYPFLKDNREKIEKILTFRIPYYVGPLAR
GNSRFAWMTRKSEETITPWNFEEVVDKGASAQSFIERMTNFDKNLPNEKVLPKHSLLYE
YFTVYNELTKVKYVTEGMRKPAFLSGEQKKAIVDLLFKTNRKVTVKQLKEDYFKKIECF
DSVEISGVEDRFNASLGTYHDLLKIIKDKDFLDNEENEDILEDIVLTLTLFEDREMIEERLK
TYAHLFDDKVMKQLKRRRYTGWGRLSRKLINGIRDKQSGKTILDFLKSDGFANRNFMQ
LIHDDSLTFKEDIQKAQVSGQGDSLHEHIANLAGSPAIKKGILQTVKVVDELVKVMGRH
KPENIVIEMARENQTTQKGQKNSRERMKRIEEGIKELGSQILKEHPVENTQLQNEKLYLY
YLQNGRDMYVDQELDINRLSDYDVDHIVPQSFLKDDSIDNKVLTRSDKNRGKSDNVPS
EEVVKKMKNYWRQLLNAKLITQRKFDNLTKAERGGLSELDKAGFIKRQLVETRQITKH
VAQILDSRMNTKYDENDKLIREVKVITLKSKLVSDFRKDFQFYKVREINNYHHAHDAYL
NAVVGTALIKKYPKLESEFVYGDYKVYDVRKMIAKSEQEIGKATAKYFFYSNIMNFFKT
EITLANGEIRKRPLIETNGETGEIVWDKGRDFATVRKVLSMPQVNIVKKTEVQTGGFSKE
SILPKRNSDKLIARKKDWDPKKYGGFDSPTVAYSVLVVAKVEKGKSKKLKSVKELLGIT
IMERSSFEKNPIDFLEAKGYKEVKKDLIIKLPKYSLFELENGRKRMLASAGELQKGNELA
LPSKYVNFLYLASHYEKLKGSPEDNEQKQLFVEQHKHYLDEIIEQISEFSKRVILADANL
DKVLSAYNKHRDKPIREQAENIIHLFTLTNLGAPAAFKYFDTTIDRKRYTSTKEVLDATLI
HQSITGLYETRIDLSQLGGDSGGSTNLSDIIEKETGKQLVIQESILMLPEEVEEVIGNKPES
DILVHTAYDESTDENVMLLTSDAPEYKPWALVIQDSNGENKIKMLSGGSPKKKRKV
huAPOBEC3G (D316R D317R)-XTEN-nCas9-UGI-NLS (mammalian construct)
(SEQ ID NO: 302)
MDPPTFTFNFNNEPWVRGRHETYLCYEVERMHNDTWVLLNQRRGFLCNQAPHKHGFL
EGRHAELCFLDVIPFWKLDLDQDYRVTCFTSWSPCFSCAQEMAKFISKNKHVSLCIFTAR
IYRRQGRCQEGLRTLAEAGAKISIMTYSEFKHCWDTFVDHQGCPFQPWDGLDEHSQDLS
GRLRAILQSGSETPGTSESATPESDKKYSIGLAIGTNSVGWAVITDEYKVPSKKFKVLGN
TDRHSIKKNLIGALLFDSGETAEATRLKRTARRRYTRRKNRICYLQEIFSNEMAKVDDSF
FHRLEESFLVEEDKKHERHPIFGNIVDEVAYHEKYPTIYHLRKKLVDSTDKADLRLIYLA
LAHMIKFRGHFLIEGDLNPDNSDVDKLFIQLVQTYNQLFEENPINASGVDAKAILSARLS
KSRRLENLIAQLPGEKKNGLFGNLIALSLGLTPNFKSNFDLAEDAKLQLSKDTYDDDLD
NLLAQIGDQYADLFLAAKNLSDAILLSDILRVNTEITKAPLSASMIKRYDEHHQDLTLLK
ALVRQQLPEKYKEIFFDQSKNGYAGYIDGGASQEEFYKFIKPILEKMDGTEELLVKLNRE
DLLRKQRTFDNGSIPHQIHLGELHAILRRQEDFYPFLKDNREKIEKILTFRIPYYVGPLAR
GNSRFAWMTRKSEETITPWNFEEVVDKGASAQSFIERMTNFDKNLPNEKVLPKHSLLYE
YFTVYNELTKVKYVTEGMRKPAFLSGEQKKAIVDLLFKTNRKVTVKQLKEDYFKKIECF
DSVEISGVEDRFNASLGTYHDLLKIIKDKDFLDNEENEDILEDIVLTLTLFEDREMIEERLK
TYAHLFDDKVMKQLKRRRYTGWGRLSRKLINGIRDKQSGKTILDFLKSDGFANRNFMQ
LIHDDSLTFKEDIQKAQVSGQGDSLHEHIANLAGSPAIKKGILQTVKVVDELVKVMGRH
KPENIVIEMARENQTTQKGQKNSRERMKRIEEGIKELGSQILKEHPVENTQLQNEKLYLY
YLQNGRDMYVDQELDINRLSDYDVDHIVPQSFLKDDSIDNKVLTRSDKNRGKSDNVPS
EEVVKKMKNYWRQLLNAKLITQRKFDNLTKAERGGLSELDKAGFIKRQLVETRQITKH
VAQILDSRMNTKYDENDKLIREVKVITLKSKLVSDFRKDFQFYKVREINNYHHAHDAYL
NAVVGTALIKKYPKLESEFVYGDYKVYDVRKMIAKSEQEIGKATAKYFFYSNIMNFFKT
EITLANGEIRKRPLIETNGETGEIVWDKGRDFATVRKVLSMPQVNIVKKTEVQTGGFSKE
SILPKRNSDKLIARKKDWDPKKYGGFDSPTVAYSVLVVAKVEKGKSKKLKSVKELLGIT
IMERSSFEKNPIDFLEAKGYKEVKKDLIIKLPKYSLFELENGRKRMLASAGELQKGNELA
LPSKYVNFLYLASHYEKLKGSPEDNEQKQLFVEQHKHYLDEIIEQISEFSKRVILADANL
DKVLSAYNKHRDKPIREQAENIIHLFTLTNLGAPAAFKYFDTTIDRKRYTSTKEVLDATLI
HQSITGLYETRIDLSQLGGDSGGSTNLSDIIEKETGKQLVIQESILMLPEEVEEVIGNKPES
DILVHTAYDESTDENVMLLTSDAPEYKPWALVIQDSNGENKIKMLSGGSPKKKRKV
Base Editor 4 (BE4; APOBEC1-linker(32 aa)-Cas9n(D10A)-linker(9 aa)-
UGI-linker(9 aa)-UGI)
(SEQ ID NO: 1084)
mSSETGPVAVDPTLRRRIEPHEFEVFFDPRELRKETCLLYEINWGGRHSIWRHTSQNTNKHVEVNFIEKFTT
ERYFCPNTRCSITWFLSWSPCGECSRAITEFLSRYPHVTLFIYIARLYHHADPRNRQGLRDLISSGVTIQIMTE
QESGYCWRNFVNYSPSNEAHWPRYPHLWVRLYVLELYCIILGLPPCLNILRRKQPQLTFFTIALQSCHYQRL
PPHILWATGLKSGGSSGGSSGSETPGTSESATPESSGGSSGGSDKKYSIGLAIGTNSVGWAVITDEYKVPSKK
FKVLGNTDRHSIKKNLIGALLFDSGETAEATRLKRTARRRYTRRKNRICYLQEIFSNEMAKVDDSFFHRLEE
SFLVEEDKKHERHPIFGNIVDEVAYHEKYPTIYHLRKKLVDSTDKADLRLIYLALAHMIKFRGHFLIEGDLN
PDNSDVDKLFIQLVQTYNQLFEENPINASGVDAKAILSARLSKSRRLENLIAQLPGEKKNGLFGNLIALSLGL
TPNFKSNFDLAEDAKLQLSKDTYDDDLDNLLAQIGDQYADLFLAAKNLSDAILLSDILRVNTEITKAPLSAS
MIKRYDEHHQDLTLLKALVRQQLPEKYKEIFFDQSKNGYAGYIDGGASQEEFYKFIKPILEKMDGTEELLV
KLNREDLLRKQRTFDNGSIPHQIHLGELHAILRRQEDFYPFLKDNREKIEKILTFRIPYYVGPLARGNSRFAW
MTRKSEETITPWNFEEVVDKGASAQSFIERMTNFDKNLPNEKVLPKHSLLYEYFTVYNELTKVKYVTEGM
RKPAFLSGEQKKAIVDLLFKTNRKVTVKQLKEDYFKKIECFDSVEISGVEDRFNASLGTYHDLLKIIKDKDF
LDNEENEDILEDIVLTLTLFEDREMIEERLKTYAHLFDDKVMKQLKRRRYTGWGRLSRKLINGIRDKQSGK
TILDFLKSDGFANRNFMQLIHDDSLTFKEDIQKAQVSGQGDSLHEHIANLAGSPAIKKGILQTVKVVDELVK
VMGRHKPENIVIEMARENQTTQKGQKNSRERMKRIEEGIKELGSQILKEHPVENTQLQNEKLYLYYLQNGR
DMYVDQELDINRLSDYDVDHIVPQSFLKDDSIDNKVLTRSDKNRGKSDNVPSEEVVKKMKNYWRQLLNA
KLITQRKFDNLTKAERGGLSELDKAGFIKRQLVETRQITKHVAQILDSRMNTKYDENDKLIREVKVITLKSK
LVSDFRKDFQFYKVREINNYHHAHDAYLNAVVGTALIKKYPKLESEFVYGDYKVYDVRKMIAKSEQEIGK
ATAKYFFYSNIMNFFKTEITLANGEIRKRPLIETNGETGEIVWDKGRDFATVRKVLSMPQVNIVKKTEVQTG
GFSKESILPKRNSDKLIARKKDWDPKKYGGFDSPTVAYSVLVVAKVEKGKSKKLKSVKELLGITIMERSSFE
KNPIDFLEAKGYKEVKKDLIIKLPKYSLFELENGRKRMLASAGELQKGNELALPSKYVNFLYLASHYEKLK
GSPEDNEQKQLFVEQHKHYLDEIIEQISEFSKRVILADANLDKVLSAYNKHRDKPIREQAENIIHLFTLTNLG
APAAFKYFDTTIDRKRYTSTKEVLDATLIHQSITGLYETRIDLSQLGGDSGGSGGSGGSTNLSDIIEKETGKQ
LVIQESILMLPEEVEEVIGNKPESDILVHTAYDESTDENVMLLTSDAPEYKPWALVIQDSNGENKIKMLSGG
SGGSGGSTNLSDIIEKETGKQLVIQESILMLPEEVEEVIGNKPESDILVHTAYDESTDENVMLLTSDAPEYKP
WALVIQDSNGENKIKMLSGGSPKKKRK

### Example 2: Anti-Cancer Vaccination Using CRISPR-Cas9 Genome/Base-Editing Technologies

[0315] Described herein are new methods to stimulate the immune system to treat tumors and prevent metastatic lesions. By turning the genome and proteome of the malignant cells into a personalized endogenous anti-cancer vaccine in vivo.

[0316] Provided herein is a new immuno-oncology methodology to raise robust T-cell and B-cell mediated immune responses against tumor-specific proteins, which are otherwise tolerated as “self” by the immune system of a cancer patient¹⁻³ (FIG. 1, Tables 1-3). This methodology is uniquely suited for programmable CRISPR-Cas9 genome- and base-editing tools,⁴⁻¹⁰ exploited to alter the translated sequences of tumor specific genes¹¹ to produce highly immunogenic heteroclitic and cryptic peptide epitopes in situ (Tables 5 and 7, FIG. 1). Heteroclitic epitopes are altered versions of endogenous peptide sequences engineered to elicit potent immune reactions through the MHC-I and MHC-II antigen presentation pathways,¹² which also produce cross-reactive responses towards the parent wild-type peptide sequences (FIG. 2A)^{2,13,14}. For example, the peptide epitope EAAGIGILTV from the melanocyte differentiation and melanoma marker MART-1²⁶⁻³⁶ is weakly immunogenic, whereas vaccination with a similar peptide engineered with a hydrophobic residue^{15,16} on the MHC-anchor position MART-1 (27L) ELAGIGILTV promotes robust T-cell immune responses against melanoma (Table 5).^{17,18} Cryptic epitopes arise from non-translated genomic sequences through processes that are elevated in cancer cells, such as aberrant mRNA splicing, alternative open-reading frames (ORFs), and deglycosidation of proteins.¹⁹ For example, LAGE-1 immunogenic antigens are expressed from ORF-2^{20,21} of the gene NY-ESO-122-24 (Table 7). Introduction of these immunogenic protein sequences using genome/base editing is designed to break “self”-tolerance to cancer-specific antigens,¹⁻³ which is known drive the infiltration of immune cells into the tumor promoting the recognition of malignant cells as foreign through multiple mechanisms (FIG. 3).^{25,26} Anti-cancer vaccination using genome/base-editing is rendered cancer-specific by targeting genes that are preferentially or exclusively expressed by tumor cells to prevent autoimmunity side effects. ^{2,27} Anti-cancer vaccination strategies could be particularly useful for the treatment of melanoma (Table 1),²⁸⁻³⁰ as well as colorectal tumors, stomach cancer, and other highly mutagenized cancers that accumulate non-synonymous hitchhiker mutations with high frequencies (FIG. 4).³¹ In such cases, spreading of the adaptive immune response towards translated “neo-epitopes”^{32,33} that are unique to the cell lineage facilitate remission34 and prevent metastatic lesions (abscopal effect)³⁵⁻³⁹ (FIG. 3). Importantly, the recently FDA-approved checkpoint inhibitors (anti-PD1 and anti-CTLA4 antibodies), which lower the threshold for T-cell stimulation,^{27,40} have shown promise for co-administration with anti-cancer vaccines,⁴¹⁻⁴⁶ and could enhance the clinical effectiveness of immunization against a broader assortment of cancer types.^{47,48}

[0317] The heteroclitic and cryptic epitopes programmed by genome/base-editing may be personalized to match each patient's malignancy and immune system, or alternatively a guide-RNA cocktail can be developed to engage the most frequent HLA allele supertypes that broadly cover the human population (FIG. 2B). Recent advances for the delivery of genome editing tools are enabling for anti-cancer vaccination. These methods include intracellular delivery using electroporation,^{49,50} viral vectors,^{51,52} cell penetrating peptides,^{53,54} liposomes,^{55,56} polymers,⁵⁷ membrane deformation,⁵⁸ and nanoparticles⁵⁹; and the types of cargo include RNA transcripts, DNA expression vectors, or Cas9 protein-guide RNA complexes purified,⁶⁰ or within cationic lipid vesicles.^{61,62} Therefore, the vaccination treatments could be potentially performed in vivo directly on tumor cells,⁶³ the tissues that originated the tumor,⁶⁴ or alternatively ex vivo for re-injection of irradiated whole-cell vaccines.⁶⁵⁻⁶⁷

[0318] Also provided herein are numerous specific examples of genomic target sites in tumor-associated genes (Tables 1-3), and the guide-RNAs designed to program the alteration of these translated sequences (Tables 5 and 7), in order to replicate or closely mimic known epitopes that have literature or pre-clinical precedent. The genome editing reactions were designed for one of the CRISPR/Cas9 tools: (i) “base editors” that catalyze chemical reactions on nucleobases (e.g. cytidine deaminase-Cas9 fusion4); or (ii) engineered nucleases with DNA cutting activity (e.g. WT Cas9,⁵⁻⁷ Cas9 nickases⁸ or Fok1-nuclease-dCas9 fusions^{9,10}). Examples of other potentially useful genome-editing reactions to alter cancer-specific genes to produce heteroclitic/cryptic epitopes are shown in Tables 5 and 7. By extension, Cas9 tools and Homology-Directed Repair (HDR) pathways may also be exploited to introduce heteroclitic epitopes through DNA templates by lowering the rate of indels using several techniques.⁶⁸⁻⁷⁰ Finally, to expand the repertoire of heteroclitic and cryptic epitopes in an unbiased high-throughput manner, the aforementioned tools could be used to screen libraries of guide-RNAs targeting all PAM sites across a tumor-associated genes of interest, which can be replicated using the genome/base-editing reactions shown in Tables 5 and 7.^{71,72}

### REFERENCES

[0319] 1. Melero, I. et al. Therapeutic vaccines for cancer: an overview of clinical trials. Nature reviews. Clinical oncology 11, 509-524, (2014).
[0320] 2. Pardoll, D. M. Inducing autoimmune disease to treat cancer. Proceedings of the National Academy of Sciences of the United States of America 96, 5340-5342, (1999).
[0321] 3. Buonaguro, L., Petrizzo, A., Tornesello, M. L. & Buonaguro, F. M. Translating tumor antigens into cancer vaccines. Clinical and vaccine immunology: CVI 18, 23-34, (2011).
[0322] 4. Komor, A. C., Kim, Y. B., Packer, M. S., Zuris, J. A. & Liu, D. R. Programmable editing of a target base in genomic DNA without double-stranded DNA cleavage. Nature advance online publication, (2016).
[0323] 5. Cong, L. et al. Multiplex genome engineering using CRISPR/Cas systems. Science 339, 819-823, (2013).
[0324] 6. Jinek, M. et al. A programmable dual-RNA-guided DNA endonuclease in adaptive bacterial immunity. Science 337, 816-821, (2012).
[0325] 7. Mali, P. et al. RNA-guided human genome engineering via Cas9. Science 339, 823-826, (2013).
[0326] 8. Ran, F. A. et al. Double nicking by RNA-guided CRISPR Cas9 for enhanced genome editing specificity. Cell 154, 1380-1389, (2013).
[0327] 9. Guilinger, J. P., Thompson, D. B. & Liu, D. R. Fusion of catalytically inactive Cas9 to FokI nuclease improves the specificity of genome modification. Nature biotechnology 32, 577-582, (2014).
[0328] 10. Tsai, S. Q. et al. Dimeric CRISPR RNA-guided FokI nucleases for highly specific genome editing. Nature biotechnology 32, 569-576, (2014).
[0329] 11. Vigneron, N., Stroobant, V., Van den Eynde, B. J. & van der Bruggen, P. Database of T cell-defined human tumor antigens: the 2013 update. Cancer immunity 13, 15, (2013).
[0330] 12. Borbulevych, O. Y., Baxter, T. K., Yu, Z., Restifo, N. P. & Baker, B. M. Increased immunogenicity of an anchor-modified tumor-associated antigen is due to the enhanced stability of the peptide/MHC complex: implications for vaccine design. J Immunol 174, 4812-4820, (2005).
[0331] 13. Bakker, A. B. et al. Analogues of CTL epitopes with improved MHC class-I binding capacity elicit anti-melanoma CTL recognizing the wild-type epitope. International journal of cancer 70, 302-309, (1997).
[0332] 14. Purcell, A. W., McCluskey, J. & Rossjohn, J. More than one reason to rethink the use of peptides in vaccine design. Nat Rev Drug Discov 6, 404-414, (2007).
[0333] 15. Chowell, D. et al. TCR contact residue hydrophobicity is a hallmark of immunogenic CD8+ T cell epitopes. Proceedings of the National Academy of Sciences of the United States of America 112, E1754-1762, (2015).
[0334] 16. Ruppert, J. et al. Prominent role of secondary anchor residues in peptide binding to HLA-A2.1 molecules. Cell 74, 929-937, (1993).
[0335] 17. Madura, F. et al. Structural basis for ineffective T-cell responses to MHC anchor residue-improved “heteroclitic” peptides. European journal of immunology 45, 584-591, (2015).
[0336] 18. Rivoltini, L. et al. A superagonist variant of peptide MART1/Melan A27-35 elicits anti-melanoma CD8+ T cells with enhanced functional characteristics: implication for more effective immunotherapy. Cancer research 59, 301-306, (1999).
[0337] 19. Andersen, R. S. et al. High frequency of T cells specific for cryptic epitopes in melanoma patients. Oncoimmunology 2, e25374, (2013).
[0338] 20. Rimoldi, D. et al. Efficient simultaneous presentation of NY-ESO-1/LAGE-1 primary and nonprimary open reading frame-derived CTL epitopes in melanoma. J Immunol 165, 7253-7261, (2000).
[0339] 21. Mandic, M. et al. The alternative open reading frame of LAGE-1 gives rise to multiple promiscuous HLA-DR-restricted epitopes recognized by T-helper 1-type tumor-reactive CD4+ T cells. Cancer research 63, 6506-6515, (2003).
[0340] 22. Campos-Perez, J. et al. DNA fusion vaccine designs to induce tumor-lytic CD8+ T-cell attack via the immunodominant cysteine-containing epitope of NY-ESO 1. International journal of cancer 133, 1400-1407, (2013).
[0341] 23. Webb, A. I. et al. Functional and structural characteristics of NY-ESO-1-related HLA A2-restricted epitopes and the design of a novel immunogenic analogue. The Journal of biological chemistry 279, 23438-23446, (2004).
[0342] 24. Chen, J. L. et al. Identification of NY-ESO-1 peptide analogues capable of improved stimulation of tumor-reactive CTL. J Immunol 165, 948-955, (2000).
[0343] 25. Lally, K. M. et al. Unmasking cryptic epitopes after loss of immunodominant tumor antigen expression through epitope spreading. International journal of cancer 93, 841-847, (2001).
[0344] 26. Fridman, W. H. et al. The ultimate goal of curative anti-cancer therapies: inducing an adaptive anti-tumor immune response. Frontiers in immunology 2, 66, (2011).
[0345] 27. Attia, P. et al. Autoimmunity correlates with tumor regression in patients with metastatic melanoma treated with anti-cytotoxic T-lymphocyte antigen-4. Journal of clinical oncology: official journal of the American Society of Clinical Oncology 23, 6043-6053, (2005).
[0346] 28. Rosenberg, S. A. et al. Immunologic and therapeutic evaluation of a synthetic peptide vaccine for the treatment of patients with metastatic melanoma. Nature medicine 4, 321-327, (1998).
[0347] 29. Slingluff, C. L., Jr. et al. Clinical and immunologic results of a randomized phase II trial of vaccination using four melanoma peptides either administered in granulocyte-macrophage colony-stimulating factor in adjuvant or pulsed on dendritic cells. Journal of clinical oncology: official journal of the American Society of Clinical Oncology 21, 4016-4026, (2003).
[0348] 30. Slingluff, C. L., Jr. et al. Immunologic and clinical outcomes of vaccination with a multiepitope melanoma peptide vaccine plus low-dose interleukin-2 administered either concurrently or on a delayed schedule. Journal of clinical oncology: official journal of the American Society of Clinical Oncology 22, 4474-4485, (2004).
[0349] 31. Lawrence, M. S. et al. Mutational heterogeneity in cancer and the search for new cancer-associated genes. Nature 499, 214-218, (2013).
[0350] 32. Duan, F. et al. Genomic and bioinformatic profiling of mutational neoepitopes reveals new rules to predict anticancer immunogenicity. J Exp Med 211, 2231-2248, (2014).
[0351] 33. Schumacher, T. N. & Schreiber, R. D. Neoantigens in cancer immunotherapy.

[0352] Science 348, 69-74, (2015).
[0353] 34. Gubin, M. M. et al. Checkpoint blockade cancer immunotherapy targets tumour-specific mutant antigens. Nature 515, 577-581, (2014).
[0354] 35. Kreiter, S. et al. Mutant MHC class II epitopes drive therapeutic immune responses to cancer. Nature 520, 692-696, (2015).
[0355] 36. Chandra, R. A. et al. A systematic evaluation of abscopal responses following radiotherapy in patients with metastatic melanoma treated with ipilimumab. Oncoimmunology 4, e1046028, (2015).
[0356] 37. Ma, Y. et al. Chemotherapy and radiotherapy: cryptic anticancer vaccines. Seminars in immunology 22, 113-124, (2010).
[0357] 38. Karbach, J. et al. Long-term complete remission following radiosurgery and immunotherapy in a melanoma patient with brain metastasis: immunologic correlates. Cancer immunology research 2, 404-409, (2014).
[0358] 39. Demaria, S. et al. Ionizing radiation inhibition of distant untreated tumors (abscopal effect) is immune mediated. International journal of radiation oncology, biology, physics 58, 862-870, (2004).
[0359] 40. Wong, R. M. et al. Programmed death-1 blockade enhances expansion and functional capacity of human melanoma antigen-specific CTLs. International immunology 19, 1223-1234, (2007).
[0360] 41. Fu, J. et al. Preclinical evidence that PD1 blockade cooperates with cancer vaccine TEGVAX to elicit regression of established tumors. Cancer research 74, 4042-4052, (2014).
[0361] 42. Gibney, G. T. et al. Safety, correlative markers, and clinical results of adjuvant nivolumab in combination with vaccine in resected high-risk metastatic melanoma. Clinical cancer research: an official journal of the American Association for Cancer Research 21, 712-720, (2015).
[0362] 43. Soares, K. C. et al. PD-1/PD-L1 blockade together with vaccine therapy facilitates effector T-cell infiltration into pancreatic tumors. J Immunother 38, 1-11, (2015).
[0363] 44. Le, D. T. et al. Evaluation of ipilimumab in combination with allogeneic pancreatic tumor cells transfected with a GM-CSF gene in previously treated pancreatic cancer. J Immunother 36, 382-389, (2013).
[0364] 45. Sierro, S. R. et al. Combination of lentivector immunization and low-dose chemotherapy or PD-1/PD-L1 blocking primes self-reactive T cells and induces anti-tumor immunity. European journal of immunology 41, 2217-2228, (2011).
[0365] 46. Hodi, F. S. et al. Biologic activity of cytotoxic T lymphocyte-associated antigen 4 antibody blockade in previously vaccinated metastatic melanoma and ovarian carcinoma patients. Proceedings of the National Academy of Sciences of the United States of America 100, 4712-4717, (2003).
[0366] 47. Morse, M. A. & Lyerly, H. K. Checkpoint blockade in combination with cancer vaccines. Vaccine 33, 7377-7385, (2015).
[0367] 48. Vanneman, M. & Dranoff, G. Combining immunotherapy and targeted therapies in cancer treatment. Nature reviews. Cancer 12, 237-251, (2012).
[0368] 49. Bakondi, B. et al. In Vivo CRISPR/Cas9 Gene Editing Corrects Retinal Dystrophy in the S334ter-3 Rat Model of Autosomal Dominant Retinitis Pigmentosa. Molecular therapy: the journal of the American Society of Gene Therapy 24, 556-563, (2016).
[0369] 50. Chen, S., Lee, B., Lee, A. Y., Modzelewski, A. J. & He, L. Highly Efficient Mouse Genome Editing by CRISPR Ribonucleoprotein Electroporation of Zygotes. The Journal of biological chemistry, (2016).
[0370] 51. Maggio, I. et al. Adenoviral vector delivery of RNA-guided CRISPR/Cas9 nuclease complexes induces targeted mutagenesis in a diverse array of human cells. Scientific reports 4, 5105, (2014).
[0371] 52. Wang, W. et al. CCR5 gene disruption via lentiviral vectors expressing Cas9 and single guided RNA renders cells resistant to HIV-1 infection. PloS one 9, e115987, (2014).
[0372] 53. Ramakrishna, S. et al. Gene disruption by cell-penetrating peptide-mediated delivery of Cas9 protein and guide RNA. Genome research 24, 1020-1027, (2014).
[0373] 54. Liu, J., Gaj, T., Patterson, J. T., Sirk, S. J. & Barbas, C. F., 3rd. Cell-penetrating peptide-mediated delivery of TALEN proteins via bioconjugation for genome engineering. PloS one 9, e85755, (2014).
[0374] 55. Ye, L. et al. Seamless modification of wild-type induced pluripotent stem cells to the natural CCR5Delta32 mutation confers resistance to HIV infection. Proceedings of the National Academy of Sciences of the United States of America 111, 9591-9596, (2014).
[0375] 56. Allen, T. M. & Cullis, P. R. Liposomal drug delivery systems: from concept to clinical applications. Advanced drug delivery reviews 65, 36-48, (2013).
[0376] 57. Efficient Delivery of Sigma CRISPRs via a Non-Liposomal Polymeric Transfection Reagent, TransIT®-CRISPR, <www.sigmaaldrich.com/technical-documents/articles/biology/transit-crispr-transfection-reagent.html> (2016).
[0377] 58. Han, X. et al. CRISPR-Cas9 delivery to hard-to-transfect cells via membrane deformation. Science advances 1, e1500454, (2015).
[0378] 59. Cox, D. B., Platt, R. J. & Zhang, F. Therapeutic genome editing: prospects and challenges. Nature medicine 21, 121-131, (2015).
[0379] 60. Kim, S., Kim, D., Cho, S. W., Kim, J. & Kim, J. S. Highly efficient RNA-guided genome editing in human cells via delivery of purified Cas9 ribonucleoproteins. Genome research 24, 1012-1019, (2014).
[0380] 61. Zuris, J. A. et al. Cationic lipid-mediated delivery of proteins enables efficient protein-based genome editing in vitro and in vivo. Nature biotechnology 33, 73-80, (2015).
[0381] 62. Wang, M. et al. Efficient delivery of genome-editing proteins using bioreducible lipid nanoparticles. Proceedings of the National Academy of Sciences of the United States of America, (2016).
[0382] 63. Villarreal, D. O. et al. Alarmin IL-33 acts as an immunoadjuvant to enhance antigen-specific tumor immunity. Cancer research 74, 1789-1800, (2014).
[0383] 64. Ginsberg, B. A. et al. Immunologic response to xenogeneic gp100 DNA in melanoma patients: comparison of particle-mediated epidermal delivery with intramuscular injection. Clinical cancer research: an official journal of the American Association for Cancer Research 16, 4057-4065, (2010).
[0384] 65. Geary, S. M., Lemke, C. D., Lubaroff, D. M. & Salem, A. K. Proposed mechanisms of action for prostate cancer vaccines. Nature reviews. Urology 10, 149-160, (2013).
[0385] 66. Dranoff, G. et al. Vaccination with irradiated tumor cells engineered to secrete murine granulocyte-macrophage colony-stimulating factor stimulates potent, specific, and long-lasting anti-tumor immunity. Proceedings of the National Academy of Sciences of the United States of America 90, 3539-3543, (1993).
[0386] 67. Chiang, C. L., Benencia, F. & Coukos, G. Whole tumor antigen vaccines. Seminars in immunology 22, 132-143, (2010).
[0387] 68. Chu, V. T. et al. Increasing the efficiency of homology-directed repair for CRISPR-Cas9-induced precise gene editing in mammalian cells. Nature biotechnology 33, 543-548, (2015).
[0388] 69. Yu, C. et al. Small molecules enhance CRISPR genome editing in pluripotent stem cells. Cell stem cell 16, 142-147, (2015).
[0389] 70. Paquet, D. et al. Efficient introduction of specific homozygous and heterozygous mutations using CRISPR/Cas9. Nature 533, 125-129, (2016).
[0390] 71. Chen, S. et al. Genome-wide CRISPR screen in a mouse model of tumor growth and metastasis. Cell 160, 1246-1260, (2015).
[0391] 72. Shalem, O., Sanjana, N. E. & Zhang, F. High-throughput functional genomics using CRISPR-Cas9. Nature reviews. Genetics 16, 299-311, (2015).
[0392] 73. Overwijk, W. W. & Restifo, N. P. B16 as a mouse model for human melanoma. Current protocols in immunology/edited by John E. Coligan . . . [et al.] Chapter 20, Unit 20 21, (2001).
[0393] 74. Saenger, Y. M. et al. Improved tumor immunity using anti-tyrosinase related protein-1 monoclonal antibody combined with DNA vaccines in murine melanoma. Cancer research 68, 9884-9891, (2008).
[0394] 75. Yu, Z. et al. Poor immunogenicity of a self/tumor antigen derives from peptide-MHC-I instability and is independent of tolerance. The Journal of clinical investigation 114, 551-559, (2004).
[0395] 76. Robbins, P. F. et al. The intronic region of an incompletely spliced gp100 gene transcript encodes an epitope recognized by melanoma-reactive tumor-infiltrating lymphocytes. J Immunol 159, 303-308, (1997).
[0396] 77. Pinilla, C. et al. Combinatorial peptide libraries as an alternative approach to the identification of ligands for tumor-reactive cytolytic T lymphocytes. Cancer research 61, 5153-5160, (2001).
[0397] 78. Wang, R. F., Parkhurst, M. R., Kawakami, Y., Robbins, P. F. & Rosenberg, S. A. Utilization of an alternative open reading frame of a normal gene in generating a novel human cancer antigen. J Exp Med 183, 1131-1140, (1996).
[0398] 79. Lupetti, R. et al. Translation of a retained intron in tyrosinase-related protein (TRP) 2 mRNA generates a new cytotoxic T lymphocyte (CTL)-defined and shared human melanoma antigen not expressed in normal cells of the melanocytic lineage. J Exp Med 188, 1005-1016, (1998).
[0399] 80. Visseren, M. J. et al. Affinity, specificity and T-cell-receptor diversity of melanoma-specific CTL generated in vitro against a single tyrosinase epitope. International journal of cancer 72, 1122-1128, (1997).
[0400] 81. Valmori, D. et al. Analysis of the cytolytic T lymphocyte response of melanoma patients to the naturally HLA-A*0201-associated tyrosinase peptide 368-376. Cancer research 59, 4050-4055, (1999).
[0401] 82. Rubio-Godoy, V. et al. Toward synthetic combinatorial peptide libraries in positional scanning format (PS-SCL)-based identification of CD8+ Tumor-reactive T-Cell Ligands: a comparative analysis of PS-SCL recognition by a single tumor-reactive CD8+ cytolytic T-lymphocyte clone. Cancer research 62, 2058-2063, (2002).
[0402] 83. Skipper, J. C. et al. An HLA-A2-restricted tyrosinase antigen on melanoma cells results from posttranslational modification and suggests a novel pathway for processing of membrane proteins. J Exp Med 183, 527-534, (1996).
[0403] 84. Bernatchez, C. et al. Altered decamer and nonamer from an HLA-A0201-restricted epitope of Survivin differentially stimulate T-cell responses in different individuals. Vaccine 29, 3021-3030, (2011).
[0404] 85. Hirohashi, Y. et al. An HLA-A24-restricted cytotoxic T lymphocyte epitope of a tumor-associated protein, survivin. Clinical cancer research: an official journal of the American Association for Cancer Research 8, 1731-1739, (2002).
[0405] 86. Gross, D. A. et al. High vaccination efficiency of low-affinity epitopes in antitumor immunotherapy. The Journal of clinical investigation 113, 425-433, (2004).
[0406] 87. Scardino, A. et al. HER-2/neu and hTERT cryptic epitopes as novel targets for broad spectrum tumor immunotherapy. J Immunol 168, 5900-5906, (2002).
[0407] 88. Aurisicchio, L. et al. A novel minigene scaffold for therapeutic cancer vaccines. Oncoimmunology 3, e27529, (2014).
[0408] 89. Bae, J., Martinson, J. A. & Klingemann, H. G. Identification of novel CD33 antigen-specific peptides for the generation of cytotoxic T lymphocytes against acute myeloid leukemia. Cellular immunology 227, 38-50, (2004).
[0409] 90. Bae, J., Martinson, J. A. & Klingemann, H. G. Heteroclitic CD33 peptide with enhanced anti-acute myeloid leukemic immunogenicity. Clinical cancer research: an official journal of the American Association for Cancer Research 10, 7043-7052, (2004).
[0410] 91. Smith, H. A., Rekoske, B. T. & McNeel, D. G. DNA vaccines encoding altered peptide ligands for SSX2 enhance epitope-specific CD8+ T-cell immune responses. Vaccine 32, 1707-1715, (2014).
[0411] 92. Oka, Y., Tsuboi, A., Oji, Y., Kawase, I. & Sugiyama, H. WT1 peptide vaccine for the treatment of cancer. Current opinion in immunology 20, 211-220, (2008).
[0412] 93. Pinilla-Ibarz, J. et al. Improved human T-cell responses against synthetic HLA-0201 analog peptides derived from the WT1 oncoprotein. Leukemia 20, 2025-2033, (2006).
[0413] 94. Di Stasi, A., Jimenez, A. M., Minagawa, K., Al-Obaidi, M. & Rezvani, K. Review of the Results of WT1 Peptide Vaccination Strategies for Myelodysplastic Syndromes and Acute Myeloid Leukemia from Nine Different Studies. Frontiers in immunology 6, 36, (2015).
[0414] 95. Tsuboi, A. et al. Enhanced induction of human WT1-specific cytotoxic T lymphocytes with a 9-mer WT1 peptide modified at HLA-A*2402-binding residues. Cancer immunology, immunotherapy: CII 51, 614-620, (2002).
[0415] 96. Trojan, A. et al. Generation of cytotoxic T lymphocytes against native and altered peptides of human leukocyte antigen-A*0201 restricted epitopes from the human epithelial cell adhesion molecule. Cancer research 61, 4761-4765, (2001).
[0416] 97. Volpe, G. et al. Alternative BCR/ABL splice variants in Philadelphia chromosome-positive leukemias result in novel tumor-specific fusion proteins that may represent potential targets for immunotherapy approaches. Cancer research 67, 5300-5307, (2007).
[0417] 98. Casnici, C. et al. Out of frame peptides from BCR/ABL alternative splicing are immunogenic in HLA A2.1 transgenic mice. Cancer letters 276, 61-67, (2009).
[0418] 99. Casnici, C. et al. Immunologic evaluation of peptides derived from BCR/ABL-out-of-frame fusion protein in HLA A2.1 transgenic mice. J Immunother 35, 321-328, (2012).
[0419] 100. Tangri, S. et al. Structural features of peptide analogs of human histocompatibility leukocyte antigen class I epitopes that are more potent and immunogenic than wild-type peptide. J Exp Med 194, 833-846, (2001).
[0420] 101. Barve, M. et al. Induction of immune responses and clinical efficacy in a phase II trial of IDM-2101, a 10-epitope cytotoxic T-lymphocyte vaccine, in metastatic non-small-cell lung cancer. Journal of clinical oncology: official journal of the American Society of Clinical Oncology 26, 4418-4425, (2008).
[0421] 102. Graff-Dubois, S. et al. Generation of CTL recognizing an HLA-A*0201-restricted epitope shared by MAGE-A1, -A2, -A3, -A4, -A6, -A10, and -A12 tumor antigens: implication in a broad-spectrum tumor immunotherapy. J Immunol 169, 575-580, (2002).
[0422] 103. Tourdot, S. et al. A general strategy to enhance immunogenicity of low-affinity HLA-A2. 1-associated peptides: implication in the identification of cryptic tumor epitopes. European journal of immunology 30, 3411-3421, (2000).
[0423] 104. Tsang, K. Y., Palena, C., Gulley, J., Arlen, P. & Schlom, J. A human cytotoxic T-lymphocyte epitope and its agonist epitope from the nonvariable number of tandem repeat sequence of MUC-1. Clinical cancer research: an official journal of the American Association for Cancer Research 10, 2139-2149, (2004).
[0424] 105. Geynisman, D. M. et al. A randomized pilot phase I study of modified carcinoembryonic antigen (CEA) peptide (CAP1-6D)/montanide/GM-CSF-vaccine in patients with pancreatic adenocarcinoma. Journal for immunotherapy of cancer 1, 8, (2013).
[0425] 106. Kleinstiver, B. P. et al. Engineered CRISPR-Cas9 nucleases with altered PAM specificities. Nature 523, 481-485, (2015).
[0426] 107. Guevara-Patino, J. A. et al. Optimization of a self antigen for presentation of multiple epitopes in cancer immunity. The Journal of clinical investigation 116, 1382-1390, (2006).
[0427] 108. Duan, F. et al. Immune rejection of mouse tumors expressing mutated self. Cancer research 69, 3545-3553, (2009).
[0428] 109. Myers, C. E. et al. Variation in cytotoxic T-lymphocyte responses to peptides derived from tyrosinase-related protein-2. Human immunology 69, 24-31, (2008).
[0429] 110. Castle, J. C. et al. Exploiting the mutanome for tumor vaccination. Cancer research 72, 1081-1091, (2012).
[0430] 111. Cho, H. I. & Celis, E. Optimized peptide vaccines eliciting extensive CD8 T-cell responses with therapeutic antitumor effects. Cancer research 69, 9012-9019, (2009).

### EQUIVALENTS AND SCOPE

[0431] In the claims articles such as “a,” “an,” and “the” may mean one or more than one unless indicated to the contrary or otherwise evident from the context. Claims or descriptions that include “or” between one or more members of a group are considered satisfied if one, more than one, or all of the group members are present in, employed in, or otherwise relevant to a given product or process unless indicated to the contrary or otherwise evident from the context. The disclosure includes embodiments in which exactly one member of the group is present in, employed in, or otherwise relevant to a given product or process. The disclosure includes embodiments in which more than one, or all of the group members are present in, employed in, or otherwise relevant to a given product or process.

[0432] Furthermore, the disclosure encompasses all variations, combinations, and permutations in which one or more limitations, elements, clauses, and descriptive terms from one or more of the listed claims is introduced into another claim. For example, any claim that is dependent on another claim can be modified to include one or more limitations found in any other claim that is dependent on the same base claim. Where elements are presented as lists, e.g., in Markush group format, each subgroup of the elements is also disclosed, and any element(s) can be removed from the group. It should it be understood that, in general, where the disclosure, or aspects of the disclosure, is/are referred to as comprising particular elements and/or features, certain embodiments of the disclosure or aspects of the disclosure consist, or consist essentially of, such elements and/or features. For purposes of simplicity, those embodiments have not been specifically set forth in haec verba herein.

[0433] It is also noted that the terms “comprising” and “containing” are intended to be open and permits the inclusion of additional elements or steps. Where ranges are given, endpoints are included. Furthermore, unless otherwise indicated or otherwise evident from the context and understanding of one of ordinary skill in the art, values that are expressed as ranges can assume any specific value or sub-range within the stated ranges in different embodiments of the disclosure, to the tenth of the unit of the lower limit of the range, unless the context clearly dictates otherwise.

[0434] This application refers to various issued patents, published patent applications, journal articles, and other publications, all of which are incorporated herein by reference. If there is a conflict between any of the incorporated references and the instant specification, the specification shall control. In addition, any particular embodiment of the present disclosure that falls within the prior art may be explicitly excluded from any one or more of the claims. Because such embodiments are deemed to be known to one of ordinary skill in the art, they may be excluded even if the exclusion is not set forth explicitly herein. Any particular embodiment of the disclosure can be excluded from any claim, for any reason, whether or not related to the existence of prior art.

[0435] Those skilled in the art will recognize or be able to ascertain using no more than routine experimentation many equivalents to the specific embodiments described herein. The scope of the present embodiments described herein is not intended to be limited to the above Description, but rather is as set forth in the appended claims. Those of ordinary skill in the art will appreciate that various changes and modifications to this description may be made without departing from the spirit or scope of the present disclosure, as defined in the following claims.

1. A method of eliciting a tumor-specific immune response in a subject in need thereof, the method comprising administering to the subject a therapeutically effective amount of a composition comprising:
(i) a fusion protein comprising (a) a guide nucleotide sequence-programmable DNA-binding protein domain; and (b) a cytosine deaminase domain; and
(ii) a guide nucleotide sequence,
wherein the guide nucleotide sequence of (ii) targets the fusion protein of (i) to a polynucleotide encoding a tumor-specific antigen in a tumor cell, wherein the fusion protein changes a target cytosine (C) base to a thymine (T) base via deamination.

2-3. (canceled)

4. The method of claim 1, wherein the polynucleotide encoding the tumor-specific antigen is located in the genome of the tumor cell.

5. (canceled)

6. The method of claim 1, wherein the guide nucleotide sequence-programmable DNA binding protein domain is selected from the group consisting of: nuclease inactive Cas9 (dCas9) domains, Cas9 nickase (nCas9) domains, nuclease inactive Cpf1 domains, nuclease inactive Argonaute domains, and variants thereof.

7. The method of claim 6, wherein the guide nucleotide sequence-programmable DNA-binding protein domain is a nuclease inactive Cas9 (dCas9) domain or an nCas9 domain.

8-14. (canceled)

15. The method of claim 1, wherein the cytosine deaminase domain is selected from the group consisting of APOBEC1, APOBEC2, APOBEC3A, APOBEC3B, APOBEC3C, APOBEC3D, APOBEC3F, APOBEC3G, APOBEC3H, APOBEC4, and activation-induced deaminase (AID).

16. (canceled)

17. The method of claim 1, wherein the fusion protein of (i) further comprises a uracil glycosylase inhibitor (UGI) domain.

18-21. (canceled)

22. The method of claim 17, wherein the fusion protein comprises the structure: NH₂-[cytosine deaminase domain]-[optional linker sequence]-[guide nucleotide sequence-programmable DNA-binding protein domain]-[optional linker sequence]-[UGI domain]-COOH; NH₂-[UGI domain]-[optional linker sequence]-[cytosine deaminase domain]-[optional linker sequence]-[guide nucleotide sequence-programmable DNA-binding protein domain]-COOH; or NH₂-[cytosine deaminase domain]-[optional linker sequence]-[guide nucleotide sequence-programmable DNA-binding protein domain]-COOH.

23-24. (canceled)

25. The method of claim 22, wherein the optional linker comprises (GGGS)ₙ, (SEQ ID NO: 337) (GGGGS)ₙ (SEQ ID NO: 308), (G)ₙ (SEQ ID NO: 783), (EAAAK)ₙ (SEQ ID NO: 309), (GGS)ₙ (SEQ ID NO: 784), SGSETPGTSESATPES (SEQ ID NO: 310), or (XP)ₙ (SEQ ID NO: 785) motif, or a combination of any of these, wherein n is independently an integer between 1 and 30 and wherein X is any amino acid.

26-27. (canceled)

28. The method of claim 1, wherein the fusion protein comprises the amino acid sequence of any one of SEQ ID NOs: 293-302, 1071, and 1084.

29. The method of claim 1, wherein the tumor-specific antigen is selected from the group consisting of: CEA; gp100; Pmel17; mammaglobin-A; Melan-A; MART-1; hTERT; TyRP1; HER2; CEA-CAM; NY-BR-1; ERBB2; OA1; PAP; PSA; RAB38; NY-MEL-1; TRP-1; gp75; TRP-2; tyrosinase (TYR); WT1; CD33; BAGE-1; D393-CD20n; Cyclin-A1; GAGE-1,2,8; GAGE-3,4,5,6,7; GnTVf; HERV-K-MEL; KK-LC-1; KM-HN-1; LAGE-1; LY6K; MAGE-A1; MAGE-A2; MAGE-A3; MAGE-A4; MAGE-A6; MAGE-A9; MAGE-A10; MAGE-A12; MAGE-C1; MAGE-C2; mucink; NA88-A; NY-ESO-1; LAGE-2; SAGE; Sp17; SSX-2; SSX-4; survivin; BIRCS; TAG-1; TAG-2; TRAG-3; TRP2-INT2g; XAGE-1b; GAGED2a; BCR-ABL (b3a2); adipophilin; AIM-2; ALDH1A1; Bc1-X(L); BING-4; CALCA; CD45; CD274; CPSF; cyclin D1; DKK1; ENAH (hMena); EpCAM; EphA3; EZH2; FGF5; glypican-3; G250; MN; CAIX; HER-2; neu; HLA-DOB; Hepsin; IDO1; IGF2B3; IL13Rα2; Intestinal carboxyl esterase; alpha-foetoprotein; Kallikrein 4; KIF20A; Lengsin; M-CSF; MCSP; mdm-2; Meloe; Midkine; MMP-2; MMP-7; MUC1; MUC5AC; p53; PAXS; PBF; PRAME; PSMA; RAGE-1; RGSS; RhoC; RNF43; RU2AS; secernin 1; SOX10; STEAP1; Telomerase; TPBG; and VEGF.

30. The method of claim 1, wherein the target C base is in a target codon located in a coding region of the polynucleotide encoding the tumor-specific antigen.

31. The method of claim 30, wherein the target codon is any one of the target codons in Tables 4 and 8, and/or wherein the target codon is converted to a modified codon selected from any one of the modified codons listed in Table 4.

32. (canceled)

33. The method of claim 1, wherein the target C base is located in a non-coding region of the polynucleotide encoding the tumor-specific antigen.

34. (canceled)

35. The method of claim 1, further comprising generating an immunogenic peptide containing an immunogenic epitope from the tumor-specific antigen, wherein the immunogenic epitope is a heteroclitic epitope or a cryptic epitope.

36. (canceled)

37. The method of claim 35, wherein the heteroclitic epitope or the cryptic epitope is at least 5 fold more immunogenic than a native epitope from the tumor-specific antigen.

38-39. (canceled)

40. The method of claim 35, wherein the immunogenic peptide is displayed on the surface of the tumor cell via the MHC class I antigen presentation pathway, or wherein the immunogenic peptide is displayed on the surface of an antigen presenting cell (APC) via the MHC class II antigen presentation pathway.

41. (canceled)

42. The method of claim 1, wherein the method is carried out in vivo.

43-50. (canceled)

51. The method of claim 30, wherein the tumor-specific antigen is gp100.

52. (canceled)

53. The method of claim 51, wherein the deamination of the target C base:
(a) in codon T210 of gp100 results in a T210I mutation;
(b) in codon A288 of gp100 results in a A288V mutation; or
(c) in codon T155 of gp100 results in a T155I mutation.

54. The method of claim 53, wherein
(a) a heteroclitic epitope comprising the amino acid sequence of IIDQVPFSV (SEQ ID NO: 786) is generated, and wherein the I at position 2 corresponds to the T210I mutation;
(b) a heteroclitic epitope comprising the amino acid sequence of YLEPGPVTV (SEQ ID NO: 818) is generated, and wherein the V at position 7 corresponds to the A288V mutation; or
(c) a heteroclitic epitope comprising the amino acid sequence of KIWGQYWQV (SEQ ID NO: 787) is generated, and wherein the I at position 2 corresponds to the T155I mutation.

55. The method of claim 54, wherein the guide nucleotide sequence comprises a nucleotide sequence selected from the group consisting of SEQ ID NOs: 724 and 870-877 and 888; or the group consisting of SEQ ID NOs: 725 and 889.

56-176. (canceled)

177. The method of claim 1, the method further comprising administering to the subject a therapeutically effective amount of an immune checkpoint inhibitor.

178-185. (canceled)

186. A method of treating cancer, the method comprising administering to a subject in need thereof a therapeutically effective amount of a composition comprising:
(i) a fusion protein comprising (a) a guide nucleotide sequence-programmable DNA-binding protein domain; and (b) a cytosine deaminase domain; and
(ii) a guide nucleotide sequence;
wherein the fusion protein of (i) and the guide nucleotide sequence of (ii) enters a tumor cell, and wherein the guide nucleotide sequence targets the fusion protein of (i) to a polynucleotide encoding a tumor-specific antigen, wherein the fusion protein changes a target cytosine (C) residue to a (T) residue in the polynucleotide or introduces an indel in the polynucleotide.

187-189. (canceled)

190. A method of inducing a tumor-specific immune response in a subject in need thereof, the method comprising administering to the subject a therapeutically effective amount of a composition comprising:
(i) a guide nucleotide sequence-programmable nuclease; and
(ii) a guide nucleotide sequence;
wherein the fusion protein of (i) and the guide nucleotide sequence of (ii) enters the tumor cell, and wherein the guide nucleotide sequence targets the fusion protein of (i) to a polynucleotide encoding a tumor-specific antigen, wherein the guide nucleotide sequence-programmable nuclease introduces an indel in the polynucleotide.

191-203. (canceled)

204. A composition comprising:
(i) a fusion protein comprising (a) a guide nucleotide sequence-programmable DNA-binding protein domain; and (b) a cytosine deaminase domain; and
(ii) a guide nucleotide sequence targeting the fusion protein of (i) to a polynucleotide encoding a tumor-specific antigen.

205. A composition comprising a polynucleotide encoding a fusion protein and a guide nucleotide sequence, wherein the fusion protein comprises (a) a guide nucleotide sequence-programmable DNA-binding protein domain; and (b) a cytosine deaminase domain, and wherein the guide nucleotide sequence targets the fusion protein to a polynucleotide encoding a tumor-specific antigen.

206. A cancer vaccine comprising:
(i) a fusion protein comprising (a) a guide nucleotide sequence-programmable DNA-binding protein domain; and (b) a cytosine deaminase domain; and
(ii) a guide nucleotide sequence targeting the fusion protein of (i) to a polynucleotide encoding a tumor-specific antigen.

207. A cancer vaccine comprising a polynucleotide encoding a fusion protein and a guide nucleotide sequence, wherein the fusion protein comprises (a) a guide nucleotide sequence-programmable DNA-binding protein domain; and (b) a cytosine deaminase domain, and wherein the guide nucleotide sequence targets the fusion protein to a polynucleotide encoding a tumor-specific antigen.

208. (canceled)

The application's sequence listing, which the Patent Office published only in electronic form, follows.

SEQUENCE LISTING (1084 sequences)

SEQ ID NO: 1 - protein, 1368 aa, Streptococcus pyogenes [sequence omitted]

SEQ ID NO: 2 - protein, 1368 aa, Artificial Sequence
  Synthetic polypeptide
MDKKYSIGLAIGTNSVGWAVITDEYKVPSKKFKVLGNTDRHSIKKNLIGALLFDSGETAEATRLKRTARRRYTRRKNRICYLQEIFSNEMAKVDDSFFHRLEESFLVEEDKKHERHPIFGNIVDEVAYHEKYPTIYHLRKKLVDSTDKADLRLIYLALAHMIKFRGHFLIEGDLNPDNSDVDKLFIQLVQTYNQLFEENPINASGVDAKAILSARLSKSRRLENLIAQLPGEKKNGLFGNLIALSLGLTPNFKSNFDLAEDAKLQLSKDTYDDDLDNLLAQIGDQYADLFLAAKNLSDAILLSDILRVNTEITKAPLSASMIKRYDEHHQDLTLLKALVRQQLPEKYKEIFFDQSKNGYAGYIDGGASQEEFYKFIKPILEKMDGTEELLVKLNREDLLRKQRTFDNGSIPHQIHLGELHAILRRQEDFYPFLKDNREKIEKILTFRIPYYVGPLARGNSRFAWMTRKSEETITPWNFEEVVDKGASAQSFIERMTNFDKNLPNEKVLPKHSLLYEYFTVYNELTKVKYVTEGMRKPAFLSGEQKKAIVDLLFKTNRKVTVKQLKEDYFKKIECFDSVEISGVEDRFNASLGTYHDLLKIIKDKDFLDNEENEDILEDIVLTLTLFEDREMIEERLKTYAHLFDDKVMKQLKRRRYTGWGRLSRKLINGIRDKQSGKTILDFLKSDGFANRNFMQLIHDDSLTFKEDIQKAQVSGQGDSLHEHIANLAGSPAIKKGILQTVKVVDELVKVMGRHKPENIVIEMARENQTTQKGQKNSRERMKRIEEGIKELGSQILKEHPVENTQLQNEKLYLYYLQNGRDMYVDQELDINRLSDYDVDAIVPQSFLKDDSIDNKVLTRSDKNRGKSDNVPSEEVVKKMKNYWRQLLNAKLITQRKFDNLTKAERGGLSELDKAGFIKRQLVETRQITKHVAQILDSRMNTKYDENDKLIREVKVITLKSKLVSDFRKDFQFYKVREINNYHHAHDAYLNAVVGTALIKKYPKLESEFVYGDYKVYDVRKMIAKSEQEIGKATAKYFFYSNIMNFFKTEITLANGEIRKRPLIETNGETGEIVWDKGRDFATVRKVLSMPQVNIVKKTEVQTGGFSKESILPKRNSDKLIARKKDWDPKKYGGFDSPTVAYSVLVVAKVEKGKSKKLKSVKELLGITIMERSSFEKNPIDFLEAKGYKEVKKDLIIKLPKYSLFELENGRKRMLASAGELQKGNELALPSKYVNFLYLASHYEKLKGSPEDNEQKQLFVEQHKHYLDEIIEQISEFSKRVILADANLDKVLSAYNKHRDKPIREQAENIIHLFTLTNLGAPAAFKYFDTTIDRKRYTSTKEVLDATLIHQSITGLYETRIDLSQLGGD

SEQ ID NO: 3 - protein, 1368 aa, Artificial Sequence
  Synthetic polypeptide
MDKKYSIGLAIGTNSVGWAVITDEYKVPSKKFKVLGNTDRHSIKKNLIGALLFDSGETAEATRLKRTARRRYTRRKNRICYLQEIFSNEMAKVDDSFFHRLEESFLVEEDKKHERHPIFGNIVDEVAYHEKYPTIYHLRKKLVDSTDKADLRLIYLALAHMIKFRGHFLIEGDLNPDNSDVDKLFIQLVQTYNQLFEENPINASGVDAKAILSARLSKSRRLENLIAQLPGEKKNGLFGNLIALSLGLTPNFKSNFDLAEDAKLQLSKDTYDDDLDNLLAQIGDQYADLFLAAKNLSDAILLSDILRVNTEITKAPLSASMIKRYDEHHQDLTLLKALVRQQLPEKYKEIFFDQSKNGYAGYIDGGASQEEFYKFIKPILEKMDGTEELLVKLNREDLLRKQRTFDNGSIPHQIHLGELHAILRRQEDFYPFLKDNREKIEKILTFRIPYYVGPLARGNSRFAWMTRKSEETITPWNFEEVVDKGASAQSFIERMTNFDKNLPNEKVLPKHSLLYEYFTVYNELTKVKYVTEGMRKPAFLSGEQKKAIVDLLFKTNRKVTVKQLKEDYFKKIECFDSVEISGVEDRFNASLGTYHDLLKIIKDKDFLDNEENEDILEDIVLTLTLFEDREMIEERLKTYAHLFDDKVMKQLKRRRYTGWGRLSRKLINGIRDKQSGKTILDFLKSDGFANRNFMQLIHDDSLTFKEDIQKAQVSGQGDSLHEHIANLAGSPAIKKGILQTVKVVDELVKVMGRHKPENIVIEMARENQTTQKGQKNSRERMKRIEEGIKELGSQILKEHPVENTQLQNEKLYLYYLQNGRDMYVDQELDINRLSDYDVDHIVPQSFLKDDSIDNKVLTRSDKNRGKSDNVPSEEVVKKMKNYWRQLLNAKLITQRKFDNLTKAERGGLSELDKAGFIKRQLVETRQITKHVAQILDSRMNTKYDENDKLIREVKVITLKSKLVSDFRKDFQFYKVREINNYHHAHDAYLNAVVGTALIKKYPKLESEFVYGDYKVYDVRKMIAKSEQEIGKATAKYFFYSNIMNFFKTEITLANGEIRKRPLIETNGETGEIVWDKGRDFATVRKVLSMPQVNIVKKTEVQTGGFSKESILPKRNSDKLIARKKDWDPKKYGGFDSPTVAYSVLVVAKVEKGKSKKLKSVKELLGITIMERSSFEKNPIDFLEAKGYKEVKKDLIIKLPKYSLFELENGRKRMLASAGELQKGNELALPSKYVNFLYLASHYEKLKGSPEDNEQKQLFVEQHKHYLDEIIEQISEFSKRVILADANLDKVLSAYNKHRDKPIREQAENIIHLFTLTNLGAPAAFKYFDTTIDRKRYTSTKEVLDATLIHQSITGLYETRIDLSQLGGD

SEQ ID NO: 4 - DNA, 4107 bp, Streptococcus pyogenes
atggataagaaatactcaataggcttagatatcggcacaaatagcgtcggatgggcggtgatcactgatgaatataaggttccgtctaaaaagttcaaggttctgggaaatacagaccgccacagtatcaaaaaaaatcttataggggctcttttatttgacagtggagagacagcggaagcgactcgtctcaaacggacagctcgtagaaggtatacacgtcggaagaatcgtatttgttatctacaggagattttttcaaatgagatggcgaaagtagatgatagtttctttcatcgacttgaagagtcttttttggtggaagaagacaagaagcatgaacgtcatcctatttttggaaatatagtagatgaagttgcttatcatgagaaatatccaactatctatcatctgcgaaaaaaattggtagattctactgataaagcggatttgcgcttaatctatttggccttagcgcatatgattaagtttcgtggtcattttttgattgagggagatttaaatcctgataatagtgatgtggacaaactatttatccagttggtacaaacctacaatcaattatttgaagaaaaccctattaacgcaagtggagtagatgctaaagcgattctttctgcacgattgagtaaatcaagacgattagaaaatctcattgctcagctccccggtgagaagaaaaatggcttatttgggaatctcattgctttgtcattgggtttgacccctaattttaaatcaaattttgatttggcagaagatgctaaattacagctttcaaaagatacttacgatgatgatttagataatttattggcgcaaattggagatcaatatgctgatttgtttttggcagctaagaatttatcagatgctattttactttcagatatcctaagagtaaatactgaaataactaaggctcccctatcagcttcaatgattaaacgctacgatgaacatcatcaagacttgactcttttaaaagctttagttcgacaacaacttccagaaaagtataaagaaatcttttttgatcaatcaaaaaacggatatgcaggttatattgatgggggagctagccaagaagaattttataaatttatcaaaccaattttagaaaaaatggatggtactgaggaattattggtgaaactaaatcgtgaagatttgctgcgcaagcaacggacctttgacaacggctctattccccatcaaattcacttgggtgagctgcatgctattttgagaagacaagaagacttttatccatttttaaaagacaatcgtgagaagattgaaaaaatcttgacttttcgaattccttattatgttggtccattggcgcgtggcaatagtcgttttgcatggatgactcggaagtctgaagaaacaattaccccatggaattttgaagaagttgtcgataaaggtgcttcagctcaatcatttattgaacgcatgacaaactttgataaaaatcttccaaatgaaaaagtactaccaaaacatagtttgctttatgagtattttacggtttataacgaattgacaaaggtcaaatatgttactgaaggaatgcgaaaaccagcatttctttcaggtgaacagaagaaagccattgttgatttactcttcaaaacaaatcgaaaagtaaccgttaagcaattaaaagaagattatttcaaaaaaatagaatgttttgatagtgttgaaatttcaggagttgaagatagatttaatgcttcattaggtacctaccatgatttgctaaaaattattaaagataaagattttttggataatgaagaaaatgaagatatcttagaggatattgttttaacattgaccttatttgaagatagggagatgattgaggaaagacttaaaacatatgctcacctctttgatgataaggtgatgaaacagcttaaacgtcgccgttatactggttggggacgtttgtctcgaaaattgattaatggtattagggataagcaatctggcaaaacaatattagattttttgaaatcagatggttttgccaatcgcaattttatgcagctgatccatgatgatagtttgacatttaaagaagacattcaaaaagcacaagtgtctggacaaggcgatagtttacatgaacatattgcaaatttagctggtagccctgctattaaaaaaggtattttacagactgtaaaagttgttgatgaattggtcaaagtaatggggcggcataagccagaaaatatcgttattgaaatggcacgtgaaaatcagacaactcaaaagggccagaaaaattcgcgagagcgtatgaaacgaatcgaagaaggtatcaaagaattaggaagtcagattcttaaagagcatcctgttgaaaatactcaattgcaaaatgaaaagctctatctctattatctccaaaatggaagagacatgtatgtggaccaagaattagatattaatcgtttaagtgattatgatgtcgatcacattgttccacaaagtttccttaaagacgattcaatagacaataaggtcttaacgcgttctgataaaaatcgtggtaaatcggataacgttccaagtgaagaagtagtcaaaaagatgaaaaactattggagacaacttctaaacgccaagttaatcactcaacgtaagtttgataatttaacgaaagctgaacgtggaggtttgagtgaacttgataaagctggttttatcaaacgccaattggttgaaactcgccaaatcactaagcatgtggcacaaattttggatagtcgcatgaatactaaatacgatgaaaatgataaacttattcgagaggttaaagtgattaccttaaaatctaaattagtttctgacttccgaaaagatttccaattctataaagtacgtgagattaacaattaccatcatgcccatgatgcgtatctaaatgccgtcgttggaactgctttgattaagaaatatccaaaacttgaatcggagtttgtctatggtgattataaagtttatgatgttcgtaaaatgattgctaagtctgagcaagaaataggcaaagcaaccgcaaaatatttcttttactctaatatcatgaacttcttcaaaacagaaattacacttgcaaatggagagattcgcaaacgccctctaatcgaaactaatggggaaactggagaaattgtctgggataaagggcgagattttgccacagtgcgcaaagtattgtccatgccccaagtcaatattgtcaagaaaacagaagtacagacaggcggattctccaaggagtcaattttaccaaaaagaaattcggacaagcttattgctcgtaaaaaagactgggatccaaaaaaatatggtggttttgatagtccaacggtagcttattcagtcctagtggttgctaaggtggaaaaagggaaatcgaagaagttaaaatccgttaaagagttactagggatcacaattatggaaagaagttcctttgaaaaaaatccgattgactttttagaagctaaaggatataaggaagttaaaaaagacttaatcattaaactacctaaatatagtctttttgagttagaaaacggtcgtaaacggatgctggctagtgccggagaattacaaaaaggaaatgagctggctctgccaagcaaatatgtgaattttttatatttagctagtcattatgaaaagttgaagggtagtccagaagataacgaacaaaaacaattgtttgtggagcagcataagcattatttagatgagattattgagcaaatcagtgaattttctaagcgtgttattttagcagatgccaatttagataaagttcttagtgcatataacaaacatagagacaaaccaatacgtgaacaagcagaaaatattattcatttatttacgttgacgaatcttggagctcccgctgcttttaaatattttgatacaacaattgatcgtaaacgatatacgtctacaaaagaagttttagatgccactcttatccatcaatccatcactggtctttatgaaacacgcattgatttgagtcagctaggaggtgactga

SEQ ID NO: 5 - protein, 1053 aa, Artificial Sequence
  Synthetic polypeptide
MKRNYILGLAIGITSVGYGIIDYETRDVIDAGVRLFKEANVENNEGRRSKRGARRLKRRRRHRIQRVKKLLFDYNLLTDHSELSGINPYEARVKGLSQKLSEEEFSAALLHLAKRRGVHNVNEVEEDTGNELSTKEQISRNSKALEEKYVAELQLERLKKDGEVRGSINRFKTSDYVKEAKQLLKVQKAYHQLDQSFIDTYIDLLETRRTYYEGPGEGSPFGWKDIKEWYEMLMGHCTYFPEELRSVKYAYNADLYNALNDLNNLVITRDENEKLEYYEKFQIIENVFKQKKKPTLKQIAKEILVNEEDIKGYRVTSTGKPEFTNLKVYHDIKDITARKEIIENAELLDQIAKILTIYQSSEDIQEELTNLNSELTQEEIEQISNLKGYTGTHNLSLKAINLILDELWHTNDNQIAIFNRLKLVPKKVDLSQQKEIPTTLVDDFILSPVVKRSFIQSIKVINAIIKKYGLPNDIIIELAREKNSKDAQKMINEMQKRNRQTNERIEEIIRTTGKENAKYLIEKIKLHDMQEGKCLYSLEAIPLEDLLNNPFNYEVDHIIPRSVSFDNSFNNKVLVKQEENSKKGNRTPFQYLSSSDSKISYETFKKHILNLAKGKGRISKTKKEYLLEERDINRFSVQKDFINRNLVDTRYATRGLMNLLRSYFRVNNLDVKVKSINGGFTSFLRRKWKFKKERNKGYKHHAEDALIIANADFIFKEWKKLDKAKKVMENQMFEEKQAESMPEIETEQEYKEIFITPHQIKHIKDFKDYKYSHRVDKKPNRELINDTLYSTRKDDKGNTLIVNNLNGLYDKDNDKLKKLINKSPEKLLMYHHDPQTYQKLKLIMEQYGDEKNPLYKYYEETGNYLTKYSKKDNGPVIKKIKYYGNKLNAHLDITDDYPNSRNKVVKLSLKPYRFDVYLDNGVYKFVTVKNLDVIKKENYYEVNSKCYEEAKKLKKISNQAEFIASFYNNDLIKINGELYRVIGVNNDLLNRIEVNMIDITYREYLENMNDKRPPRIIKTIASKTQSIKKYSTDILGNLYEVKSKKHPQIIKKG

SEQ ID NO: 6 - protein, 1053 aa, Streptococcus aureus
MKRNYILGLDIGITSVGYGIIDYETRDVIDAGVRLFKEANVENNEGRRSKRGARRLKRRRRHRIQRVKKLLFDYNLLTDHSELSGINPYEARVKGLSQKLSEEEFSAALLHLAKRRGVHNVNEVEEDTGNELSTKEQISRNSKALEEKYVAELQLERLKKDGEVRGSINRFKTSDYVKEAKQLLKVQKAYHQLDQSFIDTYIDLLETRRTYYEGPGEGSPFGWKDIKEWYEMLMGHCTYFPEELRSVKYAYNADLYNALNDLNNLVITRDENEKLEYYEKFQIIENVFKQKKKPTLKQIAKEILVNEEDIKGYRVTSTGKPEFTNLKVYHDIKDITARKEIIENAELLDQIAKILTIYQSSEDIQEELTNLNSELTQEEIEQISNLKGYTGTHNLSLKAINLILDELWHTNDNQIAIFNRLKLVPKKVDLSQQKEIPTTLVDDFILSPVVKRSFIQSIKVINAIIKKYGLPNDIIIELAREKNSKDAQKMINEMQKRNRQTNERIEEIIRTTGKENAKYLIEKIKLHDMQEGKCLYSLEAIPLEDLLNNPFNYEVDHIIPRSVSFDNSFNNKVLVKQEENSKKGNRTPFQYLSSSDSKISYETFKKHILNLAKGKGRISKTKKEYLLEERDINRFSVQKDFINRNLVDTRYATRGLMNLLRSYFRVNNLDVKVKSINGGFTSFLRRKWKFKKERNKGYKHHAEDALIIANADFIFKEWKKLDKAKKVMENQMFEEKQAESMPEIETEQEYKEIFITPHQIKHIKDFKDYKYSHRVDKKPNRELINDTLYSTRKDDKGNTLIVNNLNGLYDKDNDKLKKLINKSPEKLLMYHHDPQTYQKLKLIMEQYGDEKNPLYKYYEETGNYLTKYSKKDNGPVIKKIKYYGNKLNAHLDITDDYPNSRNKVVKLSLKPYRFDVYLDNGVYKFVTVKNLDVIKKENYYEVNSKCYEEAKKLKKISNQAEFIASFYNNDLIKINGELYRVIGVNNDLLNRIEVNMIDITYREYLENMNDKRPPRIIKTIASKTQSIKKYSTDILGNLYEVKSKKHPQIIKKG

SEQ ID NO: 7 - protein, 1388 aa, Streptococcus thermophilus
MTKPYSIGLDIGTNSVGWAVITDNYKVPSKKMKVLGNTSKKYIKKNLLGVLLFDSGITAEGRRLKRTARRRYTRRRNRILYLQEIFSTEMATLDDAFFQRLDDSFLVPDDKRDSKYPIFGNLVEEKVYHDEFPTIYHLRKYLADSTKKADLRLVYLALAHMIKYRGHFLIEGEFNSKNNDIQKNFQDFLDTYNAIFESDLSLENSKQLEEIVKDKISKLEKKDRILKLFPGEKNSGIFSEFLKLIVGNQADFRKCFNLDEKASLHFSKESYDEDLETLLGYIGDDYSDVFLKAKKLYDAILLSGFLTVTDNETEAPLSSAMIKRYNEHKEDLALLKEYIRNISLKTYNEVFKDDTKNGYAGYIDGKTNQEDFYVYLKNLLAEFEGADYFLEKIDREDFLRKQRTFDNGSIPYQIHLQEMRAILDKQAKFYPFLAKNKERIEKILTFRIPYYVGPLARGNSDFAWSIRKRNEKITPWNFEDVIDKESSAEAFINRMTSFDLYLPEEKVLPKHSLLYETFNVYNELTKVRFIAESMRDYQFLDSKQKKDIVRLYFKDKRKVTDKDIIEYLHAIYGYDGIELKGIEKQFNSSLSTYHDLLNIINDKEFLDDSSNEAIIEEIIHTLTIFEDREMIKQRLSKFENIFDKSVLKKLSRRHYTGWGKLSAKLINGIRDEKSGNTILDYLIDDGISNRNFMQLIHDDALSFKKKIQKAQIIGDEDKGNIKEVVKSLPGSPAIKKGILQSIKIVDELVKVMGGRKPESIVVEMARENQYTNQGKSNSQQRLKRLEKSLKELGSKILKENIPAKLSKIDNNALQNDRLYLYYLQNGKDMYTGDDLDIDRLSNYDIDHIIPQAFLKDNSIDNKVLVSSASNRGKSDDFPSLEVVKKRKTFWYQLLKSKLISQRKFDNLTKAERGGLLPEDKAGFIQRQLVETRQITKHVARLLDEKFNNKKDENNRAVRTVKIITLKSTLVSQFRKDFELYKVREINDFHHAHDAYLNAVIASALLKKYPKLEPEFVYGDYPKYNSFRERKSATEKVYFYSNIMNIFKKSISLADGRVIERPLIEVNEETGESVWNKESDLATVRRVLSYPQVNVVKKVEEQNHGLDRGKPKGLFNANLSSKPKPNSNENLVGAKEYLDPKKYGGYAGISNSFAVLVKGTIEKGAKKKITNVLEFQGISILDRINYRKDKLNFLLEKGYKDIELIIELPKYSLFELSDGSRRMLASILSTNNKRGEIHKGNQIFLSQKFVKLLYHAKRISNTINENHRKYVENHKKEFEELFYYILEFNENYVGAKKNGKLLNSAFQSWQNHSIDELCSSFIGPTGSERKGLFELTSRGSAADFEFLGVKIPRYRDYTPSSLLKDATLIHQSVTGLYETRIDLAKLGEG

SEQ ID NO: 8 - protein, 1121 aa, Streptococcus thermophilus
MSDLVLGLDIGIGSVGVGILNKVTGEIIHKNSRIFPAAQAENNLVRRTNRQGRRLTRRKKHRRVRLNRLFEESGLITDFTKISINLNPYQLRVKGLTDELSNEELFIALKNMVKHRGISYLDDASDDGNSSIGDYAQIVKENSKQLETKTPGQIQLERYQTYGQLRGDFTVEKDGKKHRLINVFPTSAYRSEALRILQTQQEFNPQITDEFINRYLEILTGKRKYYHGPGNEKSRTDYGRYRTSGETLDNIFGILIGKCTFYPDEFRAAKASYTAQEFNLLNDLNNLTVPTETKKLSKEQKNQIINYVKNEKAMGPAKLFKYIAKLLSCDVADIKGYRIDKSGKAEIHTFEAYRKMKTLETLDIEQMDRETLDKLAYVLTLNTEREGIQEALEHEFADGSFSQKQVDELVQFRKANSSIFGKGWHNFSVKLMMELIPELYETSEEQMTILTRLGKQKTTSSSNKTKYIDEKLLTEEIYNPVVAKSVRQAIKIVNAAIKEYGDFDNIVIEMARETNEDDEKKAIQKIQKANKDEKDAAMLKAANQYNGKAELPHSVFHGHKQLATKIRLWHQQGERCLYTGKTISIHDLINNSNQFEVDHILPLSITFDDSLANKVLVYATANQEKGQRTPYQALDSMDDAWSFRELKAFVRESKTLSNKKKEYLLTEEDISKFDVRKKFIERNLVDTRYASRVVLNALQEHFRAHKIDTKVSVVRGQFTSQLRRHWGIEKTRDTYHHHAVDALIIAASSQLNLWKKQKNTLVSYSEDQLLDIETGELISDDEYKESVFKAPYQHFVDTLKSKEFEDSILFSYQVDSKFNRKISDATIYATRQAKVGKDKADETYVLGKIKDIYTQDGYDAFMKIYKKDKSKFLMYRHDPQTFEKVIEPILENYPNKQINEKGKEVPCNPFLKYKEEHGYIRKYSKKGNGPEIKSLKYYDSKLGNHIDITPKDSNNKVVLQSVSPWRADVYFNKTTGKYEILGLKYADLQFEKGTGTYKISQEKYNDIKKKEGVDSDSEFKFTLYKNDLLLVKDTETKEQQLFRFLSRTMPKQKHYVELKPYDKQKFEGGEALIKVLGNVANSGQCKKGLGKSNISIYKVRTDVLGNQHIIKNEGDKPKLDF

SEQ ID NO: 9 - protein, 1367 aa, Artificial Sequence
  Synthetic polypeptide
DKKYSIGLAIGTNSVGWAVITDEYKVPSKKFKVLGNTDRHSIKKNLIGALLFDSGETAEATRLKRTARRRYTRRKNRICYLQEIFSNEMAKVDDSFFHRLEESFLVEEDKKHERHPIFGNIVDEVAYHEKYPTIYHLRKKLVDSTDKADLRLIYLALAHMIKFRGHFLIEGDLNPDNSDVDKLFIQLVQTYNQLFEENPINASGVDAKAILSARLSKSRRLENLIAQLPGEKKNGLFGNLIALSLGLTPNFKSNFDLAEDAKLQLSKDTYDDDLDNLLAQIGDQYADLFLAAKNLSDAILLSDILRVNTEITKAPLSASMIKRYDEHHQDLTLLKALVRQQLPEKYKEIFFDQSKNGYAGYIDGGASQEEFYKFIKPILEKMDGTEELLVKLNREDLLRKQRTFDNGSIPHQIHLGELHAILRRQEDFYPFLKDNREKIEKILTFRIPYYVGPLARGNSRFAWMTRKSEETITPWNFEEVVDKGASAQSFIERMTAFDKNLPNEKVLPKHSLLYEYFTVYNELTKVKYVTEGMRKPAFLSGEQKKAIVDLLFKTNRKVTVKQLKEDYFKKIECFDSVEISGVEDRFNASLGTYHDLLKIIKDKDFLDNEENEDILEDIVLTLTLFEDREMIEERLKTYAHLFDDKVMKQLKRRRYTGWGALSRKLINGIRDKQSGKTILDFLKSDGFANRNFMALIHDDSLTFKEDIQKAQVSGQGDSLHEHIANLAGSPAIKKGILQTVKVVDELVKVMGRHKPENIVIEMARENQTTQKGQKNSRERMKRIEEGIKELGSQILKEHPVENTQLQNEKLYLYYLQNGRDMYVDQELDINRLSDYDVDHIVPQSFLKDDSIDNKVLTRSDKNRGKSDNVPSEEVVKKMKNYWRQLLNAKLITQRKFDNLTKAERGGLSELDKAGFIKRQLVETRAITKHVAQILDSRMNTKYDENDKLIREVKVITLKSKLVSDFRKDFQFYKVREINNYHHAHDAYLNAVVGTALIKKYPKLESEFVYGDYKVYDVRKMIAKSEQEIGKATAKYFFYSNIMNFFKTEITLANGEIRKRPLIETNGETGEIVWDKGRDFATVRKVLSMPQVNIVKKTEVQTGGFSKESILPKRNSDKLIARKKDWDPKKYGGFDSPTVAYSVLVVAKVEKGKSKKLKSVKELLGITIMERSSFEKNPIDFLEAKGYKEVKKDLIIKLPKYSLFELENGRKRMLASAGELQKGNELALPSKYVNFLYLASHYEKLKGSPEDNEQKQLFVEQHKHYLDEIIEQISEFSKRVILADANLDKVLSAYNKHRDKPIREQAENIIHLFTLTNLGAPAAFKYFDTTIDRKRYTSTKEVLDATLIHQSITGLYETRIDLSQLGGD

SEQ ID NO: 10 - protein, 1300 aa, Francisella novicida
MSIYQEFVNKYSLSKTLRFELIPQGKTLENIKARGLILDDEKRAKDYKKAKQIIDKYHQFFIEEILSSVCISEDLLQNYSDVYFKLKKSDDDNLQKDFKSAKDTIKKQISEYIKDSEKFKNLFNQNLIDAKKGQESDLILWLKQSKDNGIELFKANSDITDIDEALEIIKSFKGWTTYFKGFHENRKNVYSSNDIPTSIIYRIVDDNLPKFLENKAKYESLKDKAPEAINYEQIKKDLAEELTFDIDYKTSEVNQRVFSLDEVFEIANFNNYLNQSGITKFNTIIGGKFVNGENTKRKGINEYINLYSQQINDKTLKKYKMSVLFKQILSDTESKSFVIDKLEDDSDVVTTMQSFYEQIAAFKTVEEKSIKETLSLLFDDLKAQKLDLSKIYFKNDKSLTDLSQQVFDDYSVIGTAVLEYITQQIAPKNLDNPSKKEQELIAKKTEKAKYLSLETIKLALEEFNKHRDIDKQCRFEEILANFAAIPMIFDEIAQNKDNLAQISIKYQNQGKKDLLQASAEDDVKAIKDLLDQTNNLLHKLKIFHISQSEDKANILDKDEHFYLVFEECYFELANIVPLYNKIRNYITQKPYSDEKFKLNFENSTLANGWDKNKEPDNTAILFIKDDKYYLGVMNKKNNKIFDDKAIKENKGEGYKKIVYKLLPGANKMLPKVFFSAKSIKFYNPSEDILRIRNHSTHTKNGSPQKGYEKFEFNIEDCRKFIDFYKQSISKHPEWKDFGFRFSDTQRYNSIDEFYREVENQGYKLTFENISESYIDSVVNQGKLYLFQIYNKDFSAYSKGRPNLHTLYWKALFDERNLQDVVYKLNGEAELFYRKQSIPKKITHPAKEAIANKNKDNPKKESVFEYDLIKDKRFTEDKFFFHCPITINFKSSGANKFNDEINLLLKEKANDVHILSIDRGERHLAYYTLVDGKGNIIKQDTFNIIGNDRMKTNYHDKLAAIEKDRDSARKDWKKINNIKEMKEGYLSQVVHEIAKLVIEYNAIVVFEDLNFGFKRGRFKVEKQVYQKLEKMLIEKLNYLVFKDNEFDKTGGVLRAYQLTAPFETFKKMGKQTGIIYYVPAGFTSKICPVTGFVNQLYPKYESVSKSQEFFSKFDKICYNLDKGYFEFSFDYKNFGDKAAKGKWTIASFGSRLINFRNSDKNHNWDTREVYPTKELEKLLKDYSIEYGHGECIKAAICGESDKKFFAKLTSVLNTILQMRNSKTGTELDYLISPVADVNGNFFDSRQAPKNMPQDADANGAYHIGLKGLMLLGRIKNNQEGKKLNLVIKNEEYFEFVQNRNN

SEQ ID NO: 11 - protein, 1368 aa, Streptococcus pyogenes [sequence omitted]

SEQ ID NO: 12 - protein, 1372 aa, Streptococcus gallolyticus
MTKKNYSIGLDIGTNSVGWAVITDDYKVPAKKMKVLGNTDKKYIKKNLLGALLFDSGETAEATRLKRTARRRYTRRKNRLRYLQEIFANEIAKVDESFFQRLDESFLTDDDKTFDSHPIFGNKAEEDAYHQKFPTIYHLRKHLADSSEKADLRLVYLALAHMIKFRGHFLIEGELNAENTDVQKIFADFVGVYNRTFDDSHLSEITVDVASILTEKISKSRRLENLIKYYPTEKKNTLFGNLIALALGLQPNFKTNFKLSEDAKLQFSKDTYEEDLEELLGKIGDDYADLFTSAKNLYDAILLSGILTVDDNSTKAPLSASMIKRYVEHHEDLEKLKEFIKANKSELYHDIFKDKNKNGYAGYIENGVKQDEFYKYLKNILSKIKIDGSDYFLDKIEREDFLRKQRTFDNGSIPHQIHLQEMHAILRRQGDYYPFLKEKQDRIEKILTFRIPYYVGPLVRKDSRFAWAEYRSDEKITPWNFDKVIDKEKSAEKFITRMTLNDLYLPEEKVLPKHSHVYETYAVYNELTKIKYVNEQGKESFFDSNMKQEIFDHVFKENRKVTKEKLLNYLNKEFPEYRIKDLIGLDKENKSFNASLGTYHDLKKILDKAFLDDKVNEEVIEDIIKTLTLFEDKDMIHERLQKYSDIFTANQLKKLERRHYTGWGRLSYKLINGIRNKENNKTILDYLIDDGSANRNFMQLINDDTLPFKQIIQKSQVVGDVDDIEAVVHDLPGSPAIKKGILQSVKIVDELVKVMGGNPDNIVIEMARENQTTNRGRSQSQQRLKKLQNSLKELGSNILNEEKPSYIEDKVENSHLQNDQLFLYYIQNGKDMYTGDELDIDHLSDYDIDHIIPQAFIKDDSIDNRVLTSSAKNRGKSDDVPSLDIVRARKAEWVRLYKSGLISKRKFDNLTKAERGGLTEADKAGFIKRQLVETRQITKHVAQILDARFNTEHDENDKVIRDVKVITLKSNLVSQFRKDFEFYKVREINDYHHAHDAYLNAVVGTALLKKYPKLASEFVYGEYKKYDIRKFITNSSDKATAKYFFYSNLMNFFKTKVKYADGTVFERPIIETNADGEIAWNKQIDFEKVRKVLSYPQVNIVKKVETQTGGFSKESILPKGDSDKLIPRKTKKVYWDTKKYGGFDSPTVAYSVFVVADVEKGKAKKLKTVKELVGISIMERSFFEENPVEFLENKGYHNIREDKLIKLPKYSLFEFEGGRRRLLASASELQKGNEMVLPGYLVELLYHAHRADNFNSTEYLNYVSEHKKEFEKVLSCVEDFANLYVDVEKNLSKIRAVADSMDNFSIEEISNSFINLLTLTALGAPADFNFLGEKIPRKRYTSTKECLNATLIHQSITGLYETRIDLSKLGEE

SEQ ID NO: 13 - protein, 1370 aa, Streptococcus gordonii
MKKGYSIGLDIGTNSVGFAVITDDYKVPSKKMKVLGNTDKRFIKKNLIGALLFDEGTTAEARRLKRTARRRYTRRKNRLRYLQEIFSEEMSKVDSSFFHRLDDSFLIPEDKRESKYPIFATLTEEKEYHKQFPTIYHLRKQLADSKEKTDLRLIYLALAHMIKYRGHFLYEEAFDIKNNDIQKIFNEFISIYDNTFEGSSLSGQNAQVEAIFTDKISKSAKRERVLKLFPDEKSTGLFSEFLKLIVGNQADFKKHFDLEDKAPLQFSKDTYDEDLENLLGQIGDDFTDLFVSAKKLYDAILLSGILTVTDPSTKAPLSASMIERYENHQNDLAALKQFIKNNLPEKYDEVFSDQSKDGYAGYIDGKTTQETFYKYIKNLLSKFEGTDYFLDKIEREDFLRKQRTFDNGSIPHQIHLQEMNAILRRQGEYYPFLKDNKEKIEKILTFRIPYYVGPLARGNRDFAWLTRNSDEAIRPWNFEEIVDKASSAEDFINKMTNYDLYLPEEKVLPKHSLLYETFAVYNELTKVKFIAEGLRDYQFLDSGQKKQIVNQLFKENRKVTEKDIIHYLHNVDGYDGIELKGIEKQFNASLSTYHDLLKIIKDKEFMDDAKNEAILENIVHTLTIFEDREMIKQRLAQYDSLFDEKVIKALTRRHYTGWGKLSAKLINGICDKQTGNTILDYLIDDGKINRNFMQLINDDGLSFKEIIQKAQVIGKTDDVKQVVQELSGSPAIKKGILQSIKIVDELVKVMGHAPESIVIEMARENQTTARGKKNSQQRYKRIEDSLKILASGLDSNILKENPTDNNQLQNDRLFLYYLQNGKDMYTGEALDINQLSSYDIDHIIPQAFIKDDSLDNRVLTSSKDNRGKSDNVPSIEVVQKRKAFWQQLLDSKLISERKFNNLTKAERGGLDERDKVGFIKRQLVETRQITKHVAQILDARYNTEVNEKDKKNRTVKIITLKSNLVSNFRKEFRLYKVREINDYHHAHDAYLNAVVAKAILKKYPKLEPEFVYGEYQKYDLKRYISRSKDPKEVEKATEKYFFYSNLLNFFKEEVHYADGTIVKRENIEYSKDTGEIAWNKEKDFAIIKKVLSLPQVNIVKKREVQTGGFSKESILPKGNSDKLIPRKTKDILLDTTKYGGFDSPVIAYSILLIADIEKGKAKKLKTVKTLVGITIMEKAAFEENPITFLENKGYHNVRKENILCLPKYSLFELENGRRRLLASAKELQKGNEIVLPVYLTTLLYHSKNVHKLDEPGHLEYIQKHRNEFKDLLNLVSEFSQKYVLADANLEKIKSLYADNEQADIEILANSFINLLTFTALGAPAAFKFFGKDIDRKRYTTVSEILNATLIHQSITGLYETWIDLSKLGED

SEQ ID NO: 14 - protein, 1056 aa, Staphylococcus Aureus
GSHMKRNYILGLDIGITSVGYGIIDYETRDVIDAGVRLFKEANVENNEGRRSKRGARRLKRRRRHRIQRVKKLLFDYNLLTDHSELSGINPYEARVKGLSQKLSEEEFSAALLHLAKRRGVHNVNEVEEDTGNELSTKEQISRNSKALEEKYVAELQLERLKKDGEVRGSINRFKTSDYVKEAKQLLKVQKAYHQLDQSFIDTYIDLLETRRTYYEGPGEGSPFGWKDIKEWYEMLMGHCTYFPEELRSVKYAYNADLYNALNDLNNLVITRDENEKLEYYEKFQIIENVFKQKKKPTLKQIAKEILVNEEDIKGYRVTSTGKPEFTNLKVYHDIKDITARKEIIENAELLDQIAKILTIYQSSEDIQEELTNLNSELTQEEIEQISNLKGYTGTHNLSLKAINLILDELWHTNDNQIAIFNRLKLVPKKVDLSQQKEIPTTLVDDFILSPVVKRSFIQSIKVINAIIKKYGLPNDIIIELAREKNSKDAQKMINEMQKRNRQTNERIEEIIRTTGKENAKYLIEKIKLHDMQEGKCLYSLEAIPLEDLLNNPFNYEVDHIIPRSVSFDNSFNNKVLVKQEEASKKGNRTPFQYLSSSDSKISYETFKKHILNLAKGKGRISKTKKEYLLEERDINRFSVQKDFINRNLVDTRYATRGLMNLLRSYFRVNNLDVKVKSINGGFTSFLRRKWKFKKERNKGYKHHAEDALIIANADFIFKEWKKLDKAKKVMENQMFEEKQAESMPEIETEQEYKEIFITPHQIKHIKDFKDYKYSHRVDKKPNRELINDTLYSTRKDDKGNTLIVNNLNGLYDKDNDKLKKLINKSPEKLLMYHHDPQTYQKLKLIMEQYGDEKNPLYKYYEETGNYLTKYSKKDNGPVIKKIKYYGNKLNAHLDITDDYPNSRNKVVKLSLKPYRFDVYLDNGVYKFVTVKNLDVIKKENYYEVNSKAYEEAKKLKKISNQAEFIASFYNNDLIKINGELYRVIGVNNDLLNRIEVNMIDITYREYLENMNDKRPPRIIKTIASKTQSIKKYSTDILGNLYEVKSKKHPQIIKKG

SEQ ID NO: 15 - protein, 1052 aa, Streptococcus pyogenes
LSASMIKRYDEHHQDLTLLKALVRQQLPEKYKEIFFDQSKNGYAGYIDGGASQEEFYKFIKPILEKMDGTEELLAKLNREDLLRKQRTFDNGSIPHQIHLGELHAILRRQEDFYPFLKDNREKIEKILTFRIPYYVGPLARGNSRFAWMTRKSEETITPWNFEEVVDKGASAQSFIERMTNFDKNLPNEKVLPKHSLLYEYFTVYNELTKVKYVTEGMRKPAFLSGEQKKAIVDLLFKTNRKVTVKQLKEDYFKKIECFDSVEISGVEDRFNASLGTYHDLLKIIKDKDFLDNEENEDILEDIVLTLTLFEDREMIEERLKTYAHLFDDKVMKQLKRRRYTGWGRLSRKLINGIRDKQSGKTILDFLKSDGFANRNFMQLIHDDSLTFKEDLQKAQVSGQGDSLHEHIANLAGSPAIKKGILQTVKVVDELVKVMGRHKPENIVIEMARENQTTQKGQKNSRERMKRIEEGIKELGSDILKEYPVENTQLQNEKLYLYYLQNGRDMYVDQELDINRLSDYDVDHIVPQSFLKDDSIDNKVLTRSDKNRGKSDNVPSEEVVKKMKNYWKQLLNAKLITQRKFDNLTKAERGGLSELDKAGFIKRQLVETRQITKHVAQILDSRMNTKYDENDKLIREVRVITLKSKLVSDFRKDFQFYKVREINNYHHAHDAYLNAVVGTALIKKYPKLESEFVYGDYKVYDIRKMIAKSEQEIGKATAKYFFYSNIMNFFKTEITLANGEIRKRPLIETNGETGEIVWDKGRDFATVRKVLSMPQVNIVKKTEVQTGGFSKESILPKRNSDKLIARKKDWDPKKYGGFDSPTVAYSVLVVAKVEKGKSKKLKSVKELVGITIMERSSFEKDPVDFLEAKGYKEVRKDLIIKLPKYSLFELENGRKRMLASAGELQKGNELALPSKYVNFLYLASHYEKLKGSPEDNEQKQLFVEQHKHYLDEIIEQISEFSKRVILADANLDKVLSAYNKHRDKPIREQAENIIHLFTLTNLGAPAAFKCFDTTIGRNRYKSIKEVLDATLIHQSITGLYETRIDLSQLGGD

SEQ ID NO: 16 - protein, 1368 aa, Streptococcus pyogenes [sequence omitted]

SEQ ID NO: 17 - protein, 1368 aa, Streptococcus pyogenes
MDKKYSIGLDIGTNSVGWAVITDDYKVPSKKLKGLGNTDRHGIKKNLIGALLFDSGETAEATRLKRTARRRYTRRKNRICYLQEIFSNEMAKVDDSFFHRLEESFLVEEDKKHERHPIFGNIVDEVAYHEKYPTIYHLRKKLADSTDKVDLRLIYLALAHMIKFRGHFLIEGDLNPDNSDVDKLFIQLVQTYNQLFEENPINASRVDAKAILSARLSKSRRLENLIAQLPGEKKNGLFGNLIALSLGLTPNFKSNFDLAEDAKLQLSKDTYDDDLDNLLAQIGDQYADLFLAAKNLSDATLLSDILRVNSEITKAPLSASMIKRYDEHHQDLTLLKALVRQQLPEKYKEIFFDQSKNGYAGYIDGGASQEEFYKFIKPILEKMDGTEELLAKLNREDLLRKQRTFDNGSIPYQIHLGELHAILRRQEDFYPFLKDNREKIEKILTFRIPYYVGPLARGNSRFAWMTRKSEETITPWNFEEVVDKGASAQSFIERMTNFDKNLPNEKVLPKHSLLYEYFTVYNELTKVKYVTEGMRKPAFLSGEQKKAIVDLLFKTNRKVTVKQLKEDYFKKIECFDSVEISGVEDRFNASLGTYHDLLKIIKDKDFLDNEENEDILEDIVLTLTLFEDREMIEERLKTYAHLFDDKVMKQLKRRRYTGWGRLSRKLINGIRDKQSGKTILDFLKSDGFANRNFMQLIHDDSLTFKEDIQKAQVSGQGDSLHEHIANLAGSPAIKKGILQTVKVVDELVKVMGRHKPENIVIEMARENQTTQKGQKNSRERMKRIEEGIKELGSDILKEYPVENTQLQNEKLYLYYLQNGRDMYVDQELDINRLSDYDVDHIVPQSFLKDDSIDNKVLTRSDKNRGKSDNVPSEEVVKKMKNYWRQLLNAKLITQRKFDNLTKAERGGLSELDKVGFIKRQLVETRQITKHVAQILDSRMNTKYDENDKLIREVRVITLKSKLVSDFRKDFQFYKVREINNYHHAHDAYLNAVVGTALIKKYPKLESEFVYGDYKVYDVRKMIAKSEQEIGKATAKYFFYSNIMNFFKTEITLANGEIRKRPLIETNGETGEIVWDKGRDFATVRKVLSMPQVNIVKKTEVQTGGFSKESILPKRNSDKLIARKKDWDPKKYGGFDSPTVAYSVLVVAKVEKGKSKKLKSVKELLGITIMERSSFEKDPIDFLEAKGYKEVRKDLIIKLPKYSLFELENGRKRMLASAGELQKGNELALPSKYVNFLYLASHYEKLKGSPEDNEQKQLFVEQHKHYLDEIIEQISEFSKRVILADANLDKVLSAYNKHRDKPIREQAENIIHLFTLTNLGAPAAFKYFDTTIDRKRYTSTKEVLDATLIHQSITGLYETRIDLSQLGGD

SEQ ID NO: 18 - protein, 1368 aa, Streptococcus pyogenes
MDKKYSIGLDIGTNSVGWAVITDDYKVPSKKFKVLGNTDRHSIKKNLIGALLFDSGETAEATRLKRTARRRYTRRKNRICYLQEIFSNEMAKVDDSFFHRLEESFLVEEDKKHERHPIFGNIVDEVAYHEKYPTIYHLRKKLVDSTDKADLRLIYLALAHMIKFRGHFLIEGDLNPDNSDVDKLFIQLVQTYNQLFEENPINASGVDAKAILSARLSKSRRLENLIAQLPGEKKNGLFGNLIALSLGLTPNFKSNFDLAEDAKLQLSKDTYDDDLDNLLAQIGDQYADLFLAAKNLSDAILLSDILRLNSEITKAPLSASMIKRYDEHHQDLTLLKALVRQQLPEKYKEIFFDQSKNGYAGYIDGGASQEEFYKFIKPILEKMDGTEELLAKLNREDLLRKQRTFDNGSIPHQIHLGELHAILRRQEDFYPFLKDNREKIEKILTFRIPYYVGPLARGNSRFAWMTRKSEETITPWNFEEVVDKGASAQSFIERMTNFDKNLPNEKVLPKHSLLYEYFTVYNELTKVKYVTEGMRKPAFLSGEQKKAIVDLLFKTNRKVTVKQLKEDYFKKIECFDSVEISGVEDRFNASLGTYHDLLKIIKDKDFLDNEENEDILEDIVLTLTLFEDREMIEERLKTYAHLFDDKVMKQLKRRRYTGWGRLSRKLINGIRDKQSGKTILDFLKSDGFANRNFMQLIHDDSLTFKEDIQKAQVSGQGDSLHEHIANLAGSPAIKKGILQTVKVVDELVKVMGRHKPENIVIEMARENQTTQKGQKNSRERMKRIEEGIKELGSQILKEHPVENTQLQNEKLYLYYLQNGRDMYVDQELDINRLSDYDVDHIVPQSFIKDDSIDNKVLTRSDKNRGKSNNVPSEEVVKKMKNYWRQLLNAKLITQRKFDNLTKAERGGLSELDKAGFIKRQLVETRQITKHVAQILDSRMNTKYDENDKLIREVKVITLKSKLVSDFRKDFQFYKVREINNYHHAHDAYLNAVVGTALIKKYPKLESEFVYGDYKVYDVRKMIAKSEQEIGKATAKYFFYSNIMNFFKTEITLANGEIRKRPLIETNGETGEIVWDKGRDFATVRKVLSMPQVNIVKKTEVQTGGFSKESILPKRNSDKLIARKKDWDPKKYGGFDSPTVAYSVLVVAKVEKGKSKKLKSVKELLGITIMERSSFEKNPIDFLEAKGYKEVRKDLIVKLPKYSLFELENGRKRMLASAGELQKGNELALPSKYVNFLYLASHYEKLKGSPEDNEQKQLFVEQHKHYLDEIIEQISEFSKRVILADANLDKVLSAYNKHRDKPIREQAENIIHLFTLTNLGAPAAFKYFDTTIDRKRYTSTKEVLDATFIHQSITGLYETRIDLSQLGGD

SEQ ID NO: 19 - protein, 1368 aa, Streptococcus pyogenes
MDKKYSIGLDIGTNSVGWAVITDDYKVPSKKFKVLGNTDRHSIKKNLIGALLFDSGETAEATRLKRTARRRYTRRKNRICYLQEIFSNEMAKVDDSFFHRLEESFLVEEDKKHERHPIFGNIVDEVAYHEKYPTIYHLRKKLVDSTDKADLRLIYLALAHMIKFRGHFLIEGDLNPDNSDVDKLFIQLVQTYNQLFEENPINASGVDAKAILSARLSKSRRLENLIAQLPGEKKNGLFGNLIALSLGLTPNFKSNFDLAEDAKLQLSKDTYDDDLDNLLAQIGDQYADLFLAAKNLSDAILLSDILRVNTEITKAPLSASMIKRYDEHHQDLTLLKALVRQQLPEKYKEIFFDQSKNGYAGYIDGGASQEEFYKFIKPILEKMDGTEELLVKLNREDLLRKQRTFDNGSIPHQIHLGELHAILRRQEDFYPFLKDNREKIEKILTFRIPYYVGPLARGNSRFAWMTRKSEETITPWNFEEVVDKGASAQSFIERMTNFDKNLPNEKVLPKHSLLYEYFTVYNELTKVKYVTEGMRKPAFLSGEQKKAIVDLLFKTNRKVTVKQLKEDYFKKIECFDSVEISGVEDRFNASLGTYHDLLKIIKDKDFLDNEENEDILEDIVLTLTLFEDREMIEERLKTYAHLFDDKVMKQLKRRRYTGWGRLSRKLINGIRDKQSGKTILDFLKSDGFANRNFMQLIHDDSLTFKEDIQKAQVSGQGDSLHEHIANLAGSPAIKKGILQTVKVVDELVKVMGRHKPENIVIEMARENQTTQKGQKNSRERMKRIEEGIKELGSQILKEHPVENTQLQNEKLYLYYLQNGRDMYVDQELDINRLSDYDVDHIVPQSFLKDDSIDNKVLTRSDKNRGKSDNVPSEEVVKKMKNYWRQLLNAKLITQRKFDNLTKAERGGLSELDKAGFIKRQLVETRQITKHVAQILDSRMNTKYDENDKLIREVKVITLKSKLVSDFRKDFQFYKVREINNYHHAHDAYLNAVVGTALIKKYPKLESEFVYGDYKVYDVRKMIAKSEQEIGKATAKYFFYSNIMNFFKTEITLANGEIRKRPLIETNGETGEIVWDKGRDFATVRKVLSMPQVNIVKKTEVQTGGFSKESILPKRNSDKLIARKKDWDPKKYGGFDSPTVAYSVLVVAKVEKGKSKKLKSVKELLGITIMERSSFEKNPIDFLEAKGYKEVKKDLIIKLPKYSLFELENGRKRMLASAGELQKGNELALPSKYVNFLYLASHYEKLKGSPEDNEQKQLFVEQHKHYLDEIIEQISEFSKRVILADANLDKVLSAYNKHRDKPIREQAENIIHLFTLTNLGAPAAFKYFDTTIDRKRYTSTKEVLDATLIHQSITGLYETRIDLSQLGGD

SEQ ID NO: 20 - protein, 1368 aa, Streptococcus pyogenes
MDKKYSIGLDIGTNSVGWAVITDDYKVPSKKFKVLGNTDRHSIKKNLIGALLFDSGEIAEATRLKRTARRRYTRRKNRICYLQEIFSNEMAKVDDSFFHRLEESFLVEEDKKHERHPIFGNIVDEVAYHEKYPTIYHLRKKLVDSTDKADLRLIYLALAHMIKFRGHFLIEGDLNPDNSDVDKLFIQLVQTYNQLFEENPINASGVDAKAILSARLSKSRRLENLIAQLPGEKKNGLFGNLIALSLGLTPNFKSNFDLAEDAKLQLSKDTYDDDLDNLLAQIGDQYADLFLAAKNLSDAILLSDILRLNSEITKAPLSASMIKRYDEHHQDLTLLKALVRQQLPEKYKEIFFDQSKNGYAGYIDGGASQEEFYKFIKPILEKMDGTEELLAKLNREDLLRKQRTFDNGSIPHQIHLGELHAILRRQEDFYPFLKDNREKIEKILTFRIPYYVGPLARGNSRFAWMTRKSEETITPWNFEEVVDKGASAQSFIERMTNFDKNLPNEKVLPKHSLLYEYFTVYNELTKVKYVTEGMRKPAFLSGEQKKAIVDLLFKTNRKVTVKQLKEDYFKKIECFDSVEISGVEDRFNASLGTYHDLLKIIKDKDFLDNEENEDILEDIVLTLTLFEDREMIEERLKTYAHLFDDKVMKQLKRRRYTVWGRLSRKLINGIRDKQSGKTILDFLKSDGFANRNFMQLIHDDSLTFKEDIQKAQVSGQGDSLHEHIANLAGSPAIKKGILQTVKVVDELVKVMGRHKPENIVIEMARENQTTQKGQKNSRERMKRIEEGIKELGSQILKEHPVENTQLQNEKLYLYYLQNGRDMYVDQELDINRLSDYDVDHIVPQSFIKDDSIDNKVLTRSDKNRGKSDNVPSEEVVKKMKNYWRQLLNAKLITQRKFDNLTKAERGGLSELDKAGFIKRQLVETRQITKHVAQILDSRMNTKYDENDKLIREVKVITLKSKLVSDFRKDFQFYKVREINNYHHAHDAYLNAVVGTALIKKYPKLESEFVYGDYKVYDVRKMLAKSEQEIGKATAKYFFYSNIMNFFKTEITLANGEIRKRPLIETNGETGEIVWDKGRDFATVRKVLSMPQVNIVKKTEVQTGGFSKESILPKRNSDKLIARKKDWDPKKYGGFDSPTVAYSVLVVAKVEKGKSKKLKSVKELLGITIMERSSFEKNPIDFLEAKGYKEVRKDLIIKLPKYSLFELENGRKRMLASAGELQKGNELALPSKYVNFLYLASHYEKLKGSPEDNEQKQLFVEQHKHYLDEIIEQISEFSKRVILADANLDKVLSAYNKHRDKPIREQAENIIHLFTLTNLGAPTAFKYFDTTIDRKRYTSTKEVLDATFIHQSITGLYETRIDLSQLGGD

SEQ ID NO: 21 - protein, 1368 aa, Streptococcus pyogenes
MDKKYSIGLDIGTNSVGWAVITDDYKVPSKKFKVLGNTDRHSIKKNLIGALLFDSGETAEATRLKRTARRRYTRRKNRICYLQEIFSNEIAKVDDSFFHRLEESFLVEEDKKHERHPIFGNIVDEVAYHEKYPTIYHLRKKLADSTDKADLRLIYLALAHMIKFRGHFLIEGDLNPDNSDVDKLFIQLVQTYNQLFEENPINASRVDAKAILSARLSKSRRLENLIAQLPGEKRNGLFGNLIALSLGLTPNFKSNFDLAEDAKLQLSKDTYDDDLDNLLAQIGDQYADLFLAAKNLSDAILLSDILRVNTEITKAPLSASMIKRYDEHHQDLTLLKALVRQQLPEKYKEIFFDQSKNGYAGYIDGGASQEEFYKFIKPILEKMDGTEELLAKLNREDLLRKQRTFDNGSIPHQIHLGELHAILRRQEDFYPFLKDNREKIEKILTFRIPYYVGPLARGNSRFAWMTRKSEETITPWNFEEVVDKGASAQSFIERMTNFDKNLPNEKVLPKHSLLYEYFTVYNELTKVKYVTEGMRKPAFLSGEQKKAIVDLLFKTNRKVTVKQLKEDYFKKIECFDSVEISGVEDRFNASLGTYHDLLKIIKDKDFLDNEENEDILEDIVLTLTLFEDREMIEERLKTYAHLFDDKVMKQLKRRRYTGWGRLSRKLINGIRDKQSGKTILDFLKSDGFANRNFMQLIHDDSLTFKEDLQKAQVSGQGDSLHEHIANLAGSPAIKKGILQTVKVVDELVKVMGRHKPENIVIEMARENQTTQKGQKNSRERMKRIEEGIKELGSDILKEYPVETTQLQNEKLYLYYLQNGRDMYVDQELDINRLSDYDVDHIVPQSFLKDDSIDNKVLTRSDKNRGKSDNVPSEEVVKKMKNYWKQLLNAKLITQRKFDNLTKAERGGLSELDKAGFIKRQLVETRQITKHVAQILDSRMNTKYDENDKLIREVRVITLKSKLVSDFRKDFQFYKVREINNYHHAHDAYLNAVVGTALIKKYPKLESEFVYGDYKVYDIRKMIAKSEQEIGKATAKYFFYSNIMNFFKTEITLANGEIRKRPLIETNGETGEIVWDKGRDFATVRKVLSMPQVNIVKKTEVQTGGFSKESILPKRNSDKLIARKKDWDPKKYGGFDSPTVAYSVLVVAKVEKGKSKKLKSVKELVGITIMERSSFEKDPVDFLEAKGYKEVRKDLIIKLPKYSLFELENGRKRMLASAGELQKGNELALPSKYVNFLYLASHYEKLKGSPEDNEQKQLFVEQHKHYLDEIIEQISEFSKRVILADANLDKVLSAYNKHRDKPIREQAENIIHLFTLTNLGAPAAFKCFDTTIGRNRYKSIKEVLDATLIHQSITGLYETRIDLSQLGGD

SEQ ID NO: 22 - protein, 1367 aa, Streptococcus pyogenes
MDKKYSIGLDIGTNSVGWAVITDDYKVPSKKFKVLGNTDRHSIKKNLIGALLFGSGETAEATRLKRTARRRYTRRKNRICYLQEIFSNEMAKVDDSFFHRLEESFLVEEDKKHERHPIFGNIVDEVAYHEKYPTIYHLRKKLADSTDKADLRLIYLALAHMIKFRGHFLIEGDLNPDNSDVDKLFIQLVQIYNQLFEENPINASRVDAKAILSARLSKSRRLENLIAQLPGEKRNGLFGNLIALSLGLTPNFKSNFDLAEDAKLQLSKDTYDDDLDNLLAQIGDQYADLFLAAKNLSDAILLSDILRVNSEITKAPLSASMIKRYDEHHQDLTLLKALVRQQLPEKYKEIFFDQSKNGYAGYIDGGASQEEFYKFIKPILEKMDGTEELLVKLNREDLLRKQRTFDNGSIPHQIHLGELHAILRRQEDFYPFLKDNREKIEKILTFRIPYYVGPLARGNSRFAWMTRKSEETITPWNFEEVVDKGASAQSFIERMTNFDKNLPNEKVLPKHSLLYEYFTVYNELTKVKYVTEGMRKPAFLSGEQKKAIVDLLFKTNRKVTVKQLKEDYFKKIECFDSVEISGVEDRFNASLGAYHDLLKIIKDKDFLDNEENEDILEDIVLTLTLFEDRGMIEERLKTYAHLFDDKVMKQLKRRRYTGWGRLSRKLINGIRDKQSGKTILDFLKSDGFANRNFMQLIHDDSLTFKEDIQKAQVSGQGHSLHEQIANLAGSPAIKKGILQTVKIVDELVKVMGHKPENIVIEMARENQTTQKGQKNSRERMKRIEEGIKELGSQILKEHPVENTQLQNEKLYLYYLQNGRDMYVDQELDINRLSDYDVDHIVPQSFIKDDSIDNKVLTRSDKNRGKSDNVPSEEVVKKMKNYWRQLLNAKLITQRKFDNLTKAERGGLSELDKAGFIKRQLVETRQITKHVAQILDSRMNTKYDENDKLIREVKVITLKSKLVSDFRKDFQFYKVREINNYHHAHDAYLNAVVGTALIKKYPKLESEFVYGDYKVYDVRKMIAKSEQEIGKATAKYFFYSNIMNFFKTEITLANGEIRKRPLIETNGETGEIVWDKGRDFATVRKVLSMPQVNIVKKTEVQTGGFSKESILPKRNSDKLIARKKDWDPKKYGGFDSPTVAYSVLVVAKVEKGKSKKLKSVKELLGITIMERSSFEKNPIDFLEAKGYKEVKKDLIIKLPKYSLFELENGRKRMLASAGELQKGNELALPSKYVNFLYLASHYEKLKGSPEDNEQKQLFVEQHKHYLDEIIEQISEFSKRVILADANLDKVLSAYNKHRDKPIREQAENIIHLFTLTNLGAPAAFKYFDTTIDRKRYTSTKEVLDATLIHQSITGLYETRIDLSQLGGD

SEQ ID NO: 23 - protein, 1368 aa, Streptococcus pyogenes
MDKKYSIGLDIGTNSVGWAVITDDYKVPSKKFKVLGNTDRHSIKKNLIGALLFDSGETAEATRLKRTARRRYTRRKNRICYLQEIFSNEMAKVDDSFFHRLEESFLVEEDKKHERHPIFGNIVDEVAYHEKYPTIYHLRKKLVDSTDKADLRLIYLALAHMIKFRGHFLIEGDLNPDNSDVDKLFIQLVQTYNQLFEENPINASGVDAKAILSARLSKSRRLENLIAQLPGEKKNGLFGNLIALSLGLTPNFKSNFDLAEDAKLQLSKDTYDDDLDNLLAQIGDQYADLFLAAKNLSDAILLSDILRLNSEITKAPLSASMIKRYDEHHQDLTLLKALVRQQLPEKYKEIFFDQSKNGYAGYIDGGASQEEFYKFIKPILEKMDGTEELLAKLNREDLLRKQRTFDNGSIPHQIHLGELHAILRRQEDFYPFLKDNREKIEKILTFRIPYYVGPLARGNSRFAWMTRKSEETITPWNFEEVVDKGASAQSFIERMTNFDKNLPNEKVLPKHSLLYEYFTVYNELTKVKYVTEGMRKPAFLSGEQKKAIVDLLFKTNRKVTVKQLKEDYFKKIECFDSVEISGVEDRFNASLGTYHDLLKIIKDKDFLDNEENEDILEDIVLTLTLFEDREMIEERLKTYAHLFDDKVMKQLKRRRYTGWGRLSRKLINGIRDKQSGKTILDFLKSDGFANRNFMQLIHDDSLTFKEDIQKAQVSGQGDSLHEHIANLAGSPAIKKGILQTVKVVDELVKVMGRHKPENIVIEMARENQTTQKGQKNSRERMKRIEEGIKELGSQILKEHPVENTQLQNEKLYLYYLQNGRDMYVDQELDINRLSDYDVDHIVPQSFIKDDSIDNKVLTRSDKNRGKSDNVPSEEVVKKMKNYWRQLLNAKLITQRKFDNLTKAERGGLSELDKAGFIKRQLVETRQITKHVAQILDSRMNTKYDENDKLIREVKVITLKSKLVSDFRKDFQFYKVREINNYHHAHDAYLNAVVGTALIKKYPKLESEFVYGDYKVYDVRKMIAKSEQEIGKATAKYFFYSNIMNFFKTEITLANGEIRKRPLIETNGETGEIVWDKGRDFATVRKVLSMPQVNIVKKTEVQTGGFSKESILPKRNSDKLIARKKDWDPKKYGGFDSPTVAYSVLVVAKVEKGKSKKLKSVKELLGLTIMERSSFEKNPIDFLEAKGYKEVKKDLIIKLPKYSLFELENGRKRMLASAGELQKGNELALPSKYVNFLYLASHYEKLKGSPEDNEQKQLFVEQHKHYLDEIIEQISEFSKRVILADANLDKVLSAYNKHRDKPIREQAENIIHLFTLTNLGAPAAFKYFDTTIDRKRYTSTKEVLDATLIHQSITGLYETRIDLSQLGGD

SEQ ID NO: 24 - protein, 1367 aa, Streptococcus pyogenes
MDKKYSIGLDIGTNSVGWAVITDDYKVPSKKLKVLGNTDRHGIKKNLIGALLFDSGETAEATRLKRTARRRYTRRKNRICYLQEIFSNEMAKVDDSFFHRLEESFLVEEDKKHERHPIFGNIVDEVAYHEKYPTIYHLRKKLADSTDKVDLRLIYLALAHMIKFRGHFLIEGDLNPDNSDVDKLFIQLVQTYNQLFEENPINASRVDAKAILSARLSKSRRLENLIAQLPGEKKNGLFGNLIALSLGLTPNFKSNFDLAEDAKLQLSKDTYDDDLDNLLAQIGDQYADLFLAAKNLSDAILLSDILRVNSEITKAPLSASMIKRYDEHHQDLTLLKALVRQQLPEKYKEIFFDQSKNGYAGYIDGGASQEEFYKFIKPILEKMDGTEELLAKLNREDLLRKQRTFDNGSIPYQIHLGELHAILRRQEDFYPFLKDNREKIEKILTFRIPYYVGPLARGNSRFAWMTRKSEETITPWNFEEVVDKGASAQSFIERMTNFDKNLPNEKVLPKHSLLYEYFTVYNELTKVKYVTEGMRKPAFLSGEQKKAIVDLLFKTNRKVTVKQLKEDYFKKIECFDSVEISGVEDRFNTSLGTYHDLLKIIKDKDFLDNEENEDILEDIVLTLTLFEDKEMIEERLKKYANLFDDKVMKQLKRRHYTGWGRLSRKLINGIRDKQSGKTILDFLKSDGFANRNFMQLINDDSLTFKEAIQKAQVSGQGHSLHEQIANLAGSPAIKKGILQTVKIVDELVKVMGHKPENIVIEMARENQTTQKGQKNSRERMKRIEEGIKELGSQILKEHPVENTQLQNEKLYLYYLQNGRDMYVDQELDINRLSDYDVDHIVPQSFLKDDSIDNKVLTRSDKNRGKSDNVPSEEVVKKMKNYWRQLLNAKLITQRKFDNLTKAERGGLSELDKAGFIKRQLVETRQITKHVAQILDSRMNTKYDENDKLIREVKVITLKSKLVSDFRKDFQFYKVREINNYHHAHDAYLNAVVGTALIKKYPKLESEFVYGDYKVYDVRKMIAKSEQEIGKATAKYFFYSNIMNFFKTEITLANGEIRKRPLIETNGETGEIVWDKGRDFATVRKVLSMPQVNIVKKTEVQTGGFSKESILPKRNSDKLIARKKDWDPKKYGGFDSPTVAYSVLVVAKVEKGKSKKLKSVKELLGITIMERSSFEKNPIDFLEAKGYKEVRKDLIIKLPKYSLFELENGRKRMLASAGELQKGNELALPSKYVNFLYLASHYEKLKGSPEDNEQKQLFVEQHKHYLDEIIEQISEFSKRVILADANLDKVLSAYNKHRDKPIREQAKNIIHLFTLTNLGAPAAFKYFDTTIERNRYKSIKEVLDATLIHQSITGLYETRIDLSQLGGD

SEQ ID NO: 25 - protein, 1367 aa, Streptococcus pyogenes
MDKKYSIGLDIGTNSVGWAVITDDYKVPSKKLKVLGNTDRHGIKKNLIGALLFDSGETAEATRLKRTARRRYTRRKNRICYLQEIFSNEMAKVDDSFFHRLEESFLVEEDKKHERHPIFGNIVDEVAYHEKYPTIYHLRKKLADSTDKVDLRLIYLALAHMIKFRGHFLIEGDLNPDNSDVDKLFIQLVQTYNQLFEENPINASRVDAKAILSARLSKSRRLENLIAQLPGEKKNGLFGNLIALSLGLTPNFKSNFDLAEDAKLQLSKDTYDDDLDNLLAQIGDQYADLFLAAKNLSDAILLSDILRVNSEITKAPLSASMIKRYDEHHQDLTLLKALVRQQLPEKYKEIFFDQSKNGYAGYIDGGASQEEFYKFIKPILEKMDGTEELLAKLNREDLLRKQRTFDNGSIPYQIHLGELHAILRRQEDFYPFLKDNREKIEKILTFRIPYYVGPLARGNSRFAWMTRKSEETITPWNFEEVVDKGASAQSFIERMTNFDKNLPNEKVLPKHSLLYEYFTVYNELTKVKYVTEGMRKPAFLSGEQKKAIVDLLFKTNRKVTVKQLKEDYFKKIECFDSVEISGVEDRFNTSLGTYHDLLKIIKDKDFLDNEENEDILEDIVLTLTLFEDKEMIEERLKKYANLFDDKVMKQLKRRHYTGWGRLSRKLINGIRDKQSGKTILDFLKSDGFANRNFMQLINDDSLTFKEAIQKAQVSGQGHSLHEQIANLAGSPAIKKGILQTVKIVDELVKVMGHKPENIVIEMARENQTTQKGQKNSRERMKRIEEGIKELGSQILKEHPVENTQLQNEKLYLYYLQNGRDMYVDQELDINRLSDYDVDHIVPQSFLKDDSIDNKVLTRSDKNRGKSDNVPSEEVVKKMKNYWRQLLNAKLITQRKFDNLTKAERGGLSELDKAGFIKRQLVETRQITKHVAQILDSRMNTKYDENDKLIREVKVITLKSKLVSDFRKDFQFYKVREINNYHHAHDAYLNAVVGTALIKKYPKLESEFVYGDYKVYDVRKMIAKSEQEIGKATAKYFFYSNIMNFFKTEITLANGEIRKRPLIETNGETGEIVWDKGRDFATVRKVLSMPQVNIVKKTEVQTGGFSKESILPKRNSDKLIARKKDWDPKKYGGFDSPTVAYSVLVVAKVEKGKSKKLKSVKELLGITIMERSSFEKNPIDFLEAKGYKEVRKDLIIKLPKYSLFELENGRKRMLASAGELQKGNELALPSKYVNFLYLASHYEKLKGSPEDNEQKQLFVEQHKHYLDEIIEQISEFSKRVILADANLDKVLSAYNKHRDKPIREQAKNIIHLFTLTNLGAPAAFKYFDTTIERNRYKSIKEVLDATLIHQSITGLYEIRIDLSQLGGD

SEQ ID NO: 26 - protein, 1368 aa, Streptococcus pyogenes
MDKKYSIGLDIGTNSVGWAVITDDYKVPSKKFKVLGNTDRHSIKKNLIGALLFDSGETAEATRLKRTARRRYTRRKNRICYLQEIFSNEMAKVDDSFFHRLEESFLVEEDKKHERHPIFGNIVDEVAYHEKYPTIYHLRKKLVDSTDKADLRLIYLALAHMIKFRGHFLIEGDLNPDNSDVDKLFIQLVQTYNQLFEENPINASGVDAKAILSARLSKSRRLENLIAQLPGEKKNGLFGNLIALSLGLTPNFKSNFDLAEDAKLQLSKDTYDDDLDNLLAQIGDQYADLFLAAKNLSDAILLSDILRVNTEITKASLSASMIKRYDEHHQDLTLLKALVRQQLPEKYKEIFFDQSKNGYAGYIDGGASQEEFYKFIKPILEKMDGTEELLVKLNREDLLRKQRTFDNGSIPHQIHLGELHAILRRQEDFYPFLKDNREKIEKILTFRIPYYVGPLARGNSRFAWMTRKSEETITPWNFEEVVDKGASAQSFIERMTNFDKNLPNEKVLPKHSLLYEYFTVYNELTKVKYVTEGMRKPAFLSGEQKKAIVDLLFKTNRKVTVKQLKEDYFKKIECFDSVEISGVEDRFNASLGTYHDLLKIIKDKDFLDNEENEDILEDIVLTLTLFEDREMIEERLKTYAHLFDDKVMKQLKRRRYTGWGRLSRKLINGIRDKQSGKTILDFLKSDGFANRNFMQLIHDDSLTFKEDLQKAQVSGQGDSLHEHIANLAGSPAIKKGILQTVKVVDELVKVMGRHKPENIVIEMARENQTTQKGQKNSRERMKRIEEGIKELGSDILKEYPVENTQLQNEKLYLYYLQNGRDMYVDQELDINRLSDYDVDHIVPQSFIKDDSIDNKVLTRSDKNRGKSDNVPSEEVVKKMKNYWRQLLNAKLITQRKFDNLTKAERGGLSELDKAGFIKRQLVETRQITKHVAQILDSRMNTKYDENDKLIREVKVITLKSKLVSDFRKDFQFYKVREINNYHHAHDAYLNAVVGTALIKKYPKLESEFVYGDYKVYDVRKMIAKSEQEIGKATAKYFFYSNIMNFFKTEITLANGEIRKRPLIETNGETGEIVWDKGRDFATVRKVLSMPQVNIVKKTEVQTGGFSKESILPKRNSDKLIARKKDWDPKKYGGFDSPTVAYSVLVVAKVEKGKSKKLKSVKELLGITIMERSSFEKNPIDFLEAKGYKEVRKDLIIKLPKYSLFELENGRKRMLASAGELQKGNELALPSKYVNFLYLASHYEKLKGSPEDNEQKQLFVEQHKHYLDEIIEQISEFSKRVILADANLDKVLSAYNKHRDKPIREQAENIIHLFTLTNLGAPAAFKYFDTTIGRNRYKSIKEVLDATLIHQSITGLYETRIDLSQLGGD

SEQ ID NO: 27 - protein, 1368 aa, Streptococcus pyogenes
MDKKYSIGLDIGTNSVGWAVITDDYKVPSKKFKVLGNTDRHGIKKNLIGALLFDSGETAEATRLKRTARRRYTRRKNRICYLQEIFSNEMAKVDDSFFHRLEESFLVEEDKKHERHPIFGNIVDEVAYHEKYPTIYHLRKKLADSTDKVDLRLIYLALAHMIKFRGHFLIEGDLNPDNSDVDKLFIQLVQTYNQLFEENPINASRVDAKAILSARLSKSRRLENLIAQLPGEKKNGLFGNLIALSLGLTPNFKSNFDLAEDAKLQLSKDTYDDDLDNLLAQIGDQYADLFLAAKNLSDATLLSDILRVNSEITKAPLSASMIKRYDEHHQDLTLLKALVRQQLPEKYKEIFFDQSKNGYAGYIDGGASQEEFYKFIKPILEKMDGTEELLAKLNREDLLRKQRTFDNGSIPYQIHLGELHAILRRQEDFYPFLKDNREKIEKILTFRIPYYVGPLARGNSRFAWMTRKSEETITPWNFEEVVDKGASAQSFIERMTNFDKNLPNEKVLPKHSLLYEYFTVYNELTKVKYVTEGMRKPAFLSGEQKKAIVDLLFKTNRKVTVKQLKEDYFKKIECFDSVEISGVEDRFNASLGTYHDLLKIIKDKDFLDNEENEDILEDIVLTLTLFEDREMIEERLKTYAHLFDDKVMKQLKRRRYTGWGRLSRKLINGIRDKQSGKTILDFLKSDGFANRNFMQLIHDDSLTFKEDIQKAQVSGQGDSLHEHIANLAGSPAIKKGILQTVKVVDELVKVMGRHKPENIVIEMARENQTTQKGQKNSRERMKRIEEGIKELGSDILKEYPVENTQLQNEKLYLYYLQNGRDMYVDQELDINRLSDYDVDHIVPQSFLKDDSIDNKVLTRSDKNRGKSDNVPSEEVVKKMKNYWRQLLNAKLITQRKFDNLTKAERGGLSELDKAGFIKRQLVETRQITKHVAQILDSRMNTKYDENDKLIREVKVITLKSKLVSDFRKDFQFYKVREINNYHHAHDAYLNAVVGTALIKKYPKLESEFVYGDYKVYDVRKMIAKSEQEIGKATAKYFFYSNIMNFFKTEITLANGEIRKRPLIETNGETGEIVWDKGRDFATVRKVLSMPQVNIVKKTEVQTGGFSKESILPKRNSDKLIARKKDWDPKKYGGFDSPTVAYSVLVVAKVEKGKSKKLKSVKELLGITIMERSSFEKNPIDFLEAKGYKEVRKDLIIKLPKYSLFELENGRKRMLASAGELQKGNELALPSKYVNFLYLASHYEKLKGSPEDNEQKQLFVEQHKHYLDEIIEQISEFSKRVILADANLDKVLSAYNKHRDKPIREQAENIIHLFTLTNLGAPAAFKYFDTTIDRKRYTSTKEVLDATLIHQSITGLYETRIDLSQLGGD

SEQ ID NO: 28 - protein, 1368 aa, Streptococcus pyogenes
MDKKYSIGLDIGTNSVGWAVITDDYKVPSKKFKVLGNTDRHSIKKNLIGALLFDSGETAEATRLKRTARRRYTRRKNRICYLQEIFSNEMAKVDDSFFHRLEESFLVEEDKKHERHPIFGNIVDEVAYHEKYPTIYHLRKKLADSTDKADLRLIYLALAHMIKFRGHFLIEGDLNPDNSDVDKLFIQLVQTYNQLFEENPINASRVDAKAILSARLSKSRRLENLIAQLPGEKRNGLFGNLIALSLGLTPNFKSNFDLAEDAKLQLSKDTYDDDLDNLLAQIGDQYADLFLAAKNLSDAILLSDILRVNSEITKAPLSASMIKRYDEHHQDLTLLKALVRQQLPEKYKEIFFDQSKNGYAGYIDGGASQEEFYKFIKPILEKMDGTEELLAKLNREDLLRKQRTFDNGSIPHQIHLGELHAILRRQEDFYPFLKDNREKIEKILTFRIPYYVGPLARGNSRFAWMTRKSEETITPWNFEEVVDKGASAQSFIERMTNFDKNLPNEKVLPKHSLLYEYFTVYNELTKVKYVTEGMRKPEFLSGEQKKAIVDLLFKTNRKVTVKQLKEDYFKKIECFDSVEISGVEDRFNASLGTYHDLLKIIKDKDFLDNEENEDILEDIVLTLTLFEDREMIEERLKTYAHLFDDKVMKQLKRRRYTGWGRLSRKLINGIRDKQSGKTILDFLKSDGFANRNFMQLIHDDSLTFKEDIQKAQVSGQGDSLHEHIANLAGSPAIKKGILQTVKVVDELVKVMGRHKPENIVIEMARENQTTQKGQKNSRERMKRIEEGIKELGSDILKEYPVENTQLQNEKLYLYYLQNGRDMYVDQELDINRLSDYDVDHIVPQSFIKDDSIDNKVLTRSDKNRGKSDNVPSEEVVKKMKNYWKQLLNAKLITQRKFDNLTKAERGGLSELDKAGFIKRQLVETRQITKHVAQILDSRMNTKYDENDKLIREVKVITLKSKLVSDFRKDFQFYKVREINNYHHAHDAYLNAVVGTALIKKYPKLESEFVYGDYKVYDVRKMIAKSEQEIGKATAKYFFYSNIMNFFKTEITLANGEIRKRPLIETNGETGEIVWDKGRDFATVRKVLSMPQVNIVKKTEVQTGGFSKESILPKRNSDKLIARKKDWDPKKYGGFDSPTVAYSVLVVAKVEKGKSKKLKSVKELLGITIMERSSFEKNPIDFLEAKGYKEVRKDLIIKLPKYSLFELENGRKRMLASAGELQKGNELALPSKYVNFLYLASHYEKLKGSPEDNEQKQLFVEQHKHYLDEIIEQISEFSKRVILADANLDKVLSAYNKHRDKPIREQAENIIHLFTLTNFGAPAAFIYFDTTIGRNRYKSIKEVLDATLIHQSITGLYETRIDLSQLGGD

SEQ ID NO: 29 - protein, 1368 aa, Streptococcus pyogenes
MDKKYSIGLDIGTNSVGWAVITDDYKVPSKKFKVLGNTDRHSIKKNLIGALLFDSGETAEATRLKRTARRRYTRRKNRICYLQEIFSNEIAKVDDSFFHRLEESFLVEEDKKHERHPIFGNIVDEVAYHEKYPTIYHLRKKLADSTDKADLRLIYLALAHMIKFRGHFLIEGDLNPDNSDVDKLFIQLVQTYNQLFEENPINASRVDAKAILSARLSKSRRLENLIAQLPGEKRNGLFGNLIALSLGLTPNFKSNFDLAEDAKLQLSKDTYDDDLDNLLAQIGDQYADLFLAAKNLSDAILLSDILRVNTEITKAPLSASMIKRYDEHHQDLTLLKALVRQQLPEKYKEIFFDQSKNGYAGYIDGGASQEEFYKFIKPILEKMDGTEELLAKLNREDLLRKQRTFDNGSIPHQIHLGELHAILRRQEDFYPFLKDNREKIEKILTFRIPYYVGPLARGNSRFAWMTRKSEETITPWNFEEVVDKGASAQSFIERMTNFDKNLPNEKVLPKHSLLYEYFTVYNELTKVKYVTEGMRKPAFLSGEQKKAIVDLLFKTNRKVTVKQLKEDYFKKIECFDSVEISGVEDRFNASLGTYHDLLKIIKDKDFLDNEENEDILEDIVLTLTLFEDREMIEERLKTYAHLFDDKVMKQLKRRRYTGWGRLSRKLINGIRDKQSGKTILDFLKSDGFANRNFMQLIHDDSLTFKEDLQKAQVSGQGDSLHEHIANLAGSPAIKKGILQTVKVVDELVKVMGRHKPENIVIEMARENQTTQKGQKNSRERMKRIEEGIKELGSDILKEYPVENTQLQNEKLYLYYLQNGRDMYVDQELDINRLSDYDVDHIVPQSFLKDDSIDNKVLTRSDKNRGKSDNVPSEEVVKKMKNYWKQLLNAKLITQRKFDNLTKAERGGLSELDKAGFIKRQLVETRQITKHVAQILDSRMNTKYDENDKLIREVRVITLKSKLVSDFRKDFQFYKVREINNYHHAHDAYLNAVVGTALIKKYPKLESEFVYGDYKVYDIRKMIAKSEQEIGKATAKYFFYSNIMNFFKTEITLANGEIRKRPLIETNGETGEIVWDKGRDFATVRKVLSMPQVNIVKKTEVQTGGFSKESILPKRNSDKLIARKKDWDPKKYGGFDSPTVAYSVLVVAKVEKGKSKKLKSVKELVGITIMERSSFEKDPVDFLEAKGYKEVRKDLIIKLPKYSLFELENGRKRMLASAGELQKGNELALPSKYVNFLYLASHYEKLKGSPEDNEQKQLFVEQHKHYLDEIIEQISEFSKRVILADANLDKVLSAYNKHRDKPIREQAENIIHLFTLTNLGAPAAFKYFDTTIGRNRYKSIKEVLDATLIHQSITGLYETRIDLSQLGGD

SEQ ID NO: 30 - protein, 1368 aa, Streptococcus pyogenes
MDKKYSIGLDIGTNSVGWAVITDDYKVPSKKFKVLGNTDRHSIKKNLIGALLFDSGETAEATRLKRTARRRYTRRKNRICYLQEIFSNEIAKVDDSFFHRLEESFLVEEDKKHERHPIFGNIVDEVAYHEKYPTIYHLRKKLADSTDKADLRLIYLALAHMIKFRGHFLIEGGLNPDNSDVDKLFIQLVQTYNQLFEENPINASRVDAKAILSARLSKSRRLENLIAQLPGEKRNGLFGNLIALSLGLTPNFKSNFDLAEDAKLQLSKDTYDDDLDNLLAQIGDQYADLFLAAKNLSDAILLSDILRVNTEITKAPLSASMIKRYDEHHQDLTLLKALVRQQLPEKYKEIFFDQSKNGYAGYIDGGASQEEFYKFIKPILEKMDGTEELLAKLNREDLLRKQRTFDNGSIPHQIHLGELHAILRRQEDFYPFLKDNREKIEKILTFRIPYYVGPLARGNSRFAWMTRKSEETITPWNFEEVVDKGASAQSFIERMTNFDKNLPNEKVLPKHSLLYEYFTVYNELTKVKYVTEGMRKPAFLSGEQKKAIVDLLFKTNRKVTVKQLKEDYFKKIECFDSVEISGVEDRFNASLGTYHDLLKIIKDKDFLDNEENEDILEDIVLTLTLFEDREMIEERLKTYAHLFDDKVMKQLKRRRYTGWGRLSRKLINGIRDKQSGKTILDFLKSDGFANRNFMQLIHDDSLTFKEDLQKAQVSGQGDSLHEHIANLAGSPAIKKGILQTVKVVDELVKVMGRHKPENIVIEMARENQTTQKGQKNSRERMKRIEEGIKELGSDILKEYPVENTQLQNEKLYLYYLQNGRDMYVDQELDINRLSDYDVDHIVPQSFLKDDSIDNKVLTRSDKNRGKSDNVPSEEVVKKMKNYWKQLLNAKLITQRKFDNLTKAERGGLSELDKAGFIKRQLVETRQITKHVAQILDSRMNTKYDENDKLIREVRVITLKSKLVSDFRKDFQFYKVREINNYHHAHDAYLNAVVGTALIKKYPKLESEFVYGDYKVYDIRKMIAKSEQEIGKATAKYFFYSNIMNFFKTEITLANGEIRKRPLIETNGETGEIVWDKGRDFATVRKVLSMPQVNIVKKTEVQTGGFSKESILPKRNSDKLIARKKDWDPKKYGGFDSPTVAYSVLVVAKVEKGKSKKLKSVKELVGITIMERSSFEKDPVDFLEAKGYKEVRKDLIIKLPKYSLFELENGRKRMLASAGELQKGNELALPSKYVNFLYLASHYEKLKGSPEDNEQKQLFVEQHKHYLDEIIEQISEFSKRVILADANLDKVLSAYNKHRDKPIREQAENIIHLFTLTNLGAPAAFKYFDTTIGRNRYKSIKEVLDATLIHQSITGLYETRIDLSQLGGD

SEQ ID NO: 31 - protein, 1368 aa, Streptococcus pyogenes
MDKKYSIGLDIGTNSVGWAVITDDYKVPSKKFKVLGNTDRHSIKKNLIGALLFDSGETAEATRLKRTARRRYTRRKNRICYLQEIFSNEMAKVDDSFFHRLEESFLVEEDKKHERHPIFGNIVDEVAYHEKYPTIYHLRKKLVDSTDKADLRLIYLALAHMIKFRGHFLIEGDLNPDNSDVDKLFIQLVQTYNQLFEENPINANGVDAKAILSARLSKSRRLENLIAQLPGEKKNGLFGNLIALSLGLTPNFKSNFDLAEDAKLQLSKDTYDDDLDNLLAQIGDQYADLFLAAKNLSDAILLSDILRVNTEITKAPLSASMIKRYDEHHQDLTLLKALVRQQLPEKYKEIFFDQSKNGYAGYIDGGASQEEFYKFIKPILEKMDGTEELLVKLNREDLLRKQRTFDNGSIPHQIHLGELHAILRRQEDFYPFLKDNREKIEKILTFRIPYYVGPLARGNSRFAWMTRKSEETITPWNFEEVVDKGASAQSFIERMTNFDKNLPNEKVLPKHSLLYEYFTVYNELTKVKYVTEGMRKPAFLSGEQKKAIVDLLFKTNRKVTVKQLKEDYFKKIECFDSVEISGVEDRFNASLGTYHDLLKIIKDKDFLDNEENEDILEDIVLTLTLFEDREMIEERLKTYAHLFDDKVMKQLKRRRYTGWGRLSRKLINGIRDKQSGKTILDFLKSDGFANRNFMQLIHDDSLTFKEDIQKAQVSGQGDSLHEHIANLAGSPAIKKGILQTVKVVDELVKVMGRHKPENIVIEMARENQTTQKGQKNSRERMKRIEEGIKELGSQILKEHPVENTQLQNEKLYLYYLQNGRDMYVDQELDINRLSDYDVDHIVPQSFLKDDSIDNKVLTRSDKNRGKSDNVPSEEVVKKMKNYWRQLLNAKLITQRKFDNLTKAERGGLSELDKAGFIKRQLVETRQITKHVAQILDSRMNTKYDENDKLIREVKVITLKSKLVSDFRKDFQFYKVREINNYHHAHDAYLNAVVGTALIKKYPKLESEFVYGDYKVYDVRKMIAKSEQEIGKATAKYFFYSNIMNFFKTEITLANGEIRKRPLIETNGETGEIVWDKGRDFATVRKVLSMPQVNIVKKTEVQTGGFSKESILPKRNSDKLIARKKDWDPKKYGGFDSPTVAYSVLVVAKVEKGKSKKLKSVKELLGITIMERSSFEKNPIDFLEAKGYKEVKKDLIIKLPKYSLFELENGRKRMLASAGELQKGNELALPSKYVNFLYLASHYEKLKGSPEDNEQKQLFVEQHKHYLDEIIEQISEFSKRVILADANLDKVLSAYNKHRDKPIREQAENIIHLFTLTNLGAPAAFKYFDTTIDRKRYTSTKEVLDATLIHQSITGLYETRIDLSQLGGD

SEQ ID NO: 32 - protein, 1368 aa, Streptococcus pyogenes
MDKKYSIGLDIGTNSVGWAVITDDYKVPSKKFKVLGNTDRHSIKKNLIGALLFDSGETAEATRLKRTARRRYTRRKNRICYLQEIFSNEMAKVDDSFFHRLEESFLVEEDKKHERHPIFGNIVDEVAYHEKYPTIYHLRKKLADSTDKADLRLIYLALAHMIKFRGHFLIEGDLNPDNSDVDKLFIQLVQTYNQLFEENPINASRVDAKAILSARLSKSRRLENLIAQLPGEKKNGLFGNLIALLLGLTPNFKSNFDLAEDAKLQLSKDTYDDDLDNLLAQIGDQYADLFLAAKNLSDAILLSDILRVNSEITKAPLSASMIKRYDEHHQDLTLLKALVRQQLPEKYKEIFFDQSKNGYAGYIDGGASQEEFYKFIKPILEKMDGTEELLAKLNREDLLRKQRTFDNGSIPHQIHLGELHAILRRQEDFYPFLKDNREKIEKILTFRIPYYVGPLARGNSRFAWMTRKSEETITPWNFEEVVDKGASAQSFIERMTNFDKNLPNEKVLPKHSLLYEYFTVYNELTKVKYVTEGMRKPAFLSGEQKKAIVDLLFKTNRKVTVKQLKEDYFKKIECFDSVEISGVEDRFNASLGTYHDLLKIIKDKDFLDNEENEDILEDIVLTLTLFEDKEMIEERLKKYAHLFDDKVMKQLKRRRYTGWGRLSRKLINGIRDKQSGKTILDFLKSDGFANRNFMQLIHDDSLTFKEDIQKAQVSGQGDSLHEHIANLAGSPAIKKGILQTVKVVDELVKVMGRHKPENIVIEMARENQTTQKGQKNSRERMKRIEEGIKELGSDILKEYPVENTQLQNEKLYLYYLQNGRDMYVDQELDINRLSDYDVDHIVPQSFLKDDSIDNKVLTRSDKNRGKSDNVPSEEVVKKMKNYWKQLLNAKLITQRKFDNLTKAERGGLSELDKAGFIKRQLVETRQITKHVAQILDSRMNTKYDENDKLIREVRVITLKSKLVSDFRKDFQFYKVREINNYHHAHDAYLNAVVGTALIKKYPKLESEFVYGDYKVYDVRKMIAKSEQEIGKATAKYFFYSNIMNFFKTEITLANGEIRKRPLIETNGETGEIVWDKGRDFATVRKVLSMPQVNIVKKTEVQTGGFSKESILPKRNSDKLIARKKDWDPKKYGGFDSPTVAYSVLVVAKVEKGKSKKLKSVKELLGITIMERSSFEKNPIDFLEAKGYKEVRKDLIIKLPKYSLFELENGRKRMLASAGELQKGNELALPSKYVNFLYLASHYEKLKGSPEDNEQKQLFVEQHKHYLDEIIEQISEFSKRVILADANLDKVLSAYNKHRDKPIREQAENIIHLFTLTNLGAPAAFKYFDTTIDRKRYTSTKEVLDATLIHQSITGLYETRIDLSQLGGD

SEQ ID NO: 33 - protein, 1368 aa, Streptococcus pyogenes
MDKKYSIGLDIGTNSVGWAVITDDYKVPSKKFKVLGNTDRHSIKKNLIGALLFDSGEIAEATRLKRTARRRYTRRKNRICYLQEIFSNEMAKVDDSFFHRLEESFLVEEDKKHERHPIFGNIVDEVAYHEKYPTIYHLRKKLVDSTDKADLRLIYLALAHMIKFRGHFLIEGDLNPDNSDVDKLFIQLVQTYNQLFEENPINASGVDAKAILSARLSKSRRLENLIAQLPGEKKNGLFGNLIALSLGLTPNFKSNFDLAEDAKLQLSKDTYDDDLDNLLAQIGDQYADLFLAAKNLSDAILLSDILRLNSEITKAPLSASMIKRYDEHHQDLTLLKALVRQQLPEKYKEIFFDQSKNGYAGYIDGGASQEEFYKFIKPILEKMDGTEELLAKLNRKDLLRKQRTFDNGSIPHQIHLGELHAILRRQEDFYPFLKDNREKIEKILTFRIPYYVGPLARGNSRFAWMTRKSEETITPWNFEEVVDKGASAQSFIERMTNFDKNLPNEKVLPKHSLLYEYFTVYNELTKVKYVTEGMRKPAFLSGEQKKAIVDLLFKTNRKVTVKQLKEDYFKKIECFDSVEISGVEDRFNASLGTYHDLLKIIKDKDFLDNEENEDILEDIVLTLTLFEDREMIEERLKTYAHLFDDKVMKQLKRRRYTGWGRLSRKLINGIRDKQSGKTILDFLKSDGFANRNFMQLIHDDSLTFKEDIQKAQVSGQGDSLHEHIANLAGSPAIKKGILQTVKVVDELVKVMGRHKPENIVIEMARENQTTQKGQKNSRERMKRIEEGIKELGSQILKEHPVENTQLQNEKLYLYYLQNGRDMYVDQELDINRLSDYDVDHIVPQSFIKDDSIDNKVLTRSDKNRGKSDNVPSEEVVKKMKNYWRQLLNAKLITQRKFDNLTKAERGGLSELDKAGFIKRQLVETRQITKHVAQILDSRMNTKYDENDKLIREVKVITLKSKLVSDFRKDFQFYKVREINNYHHAHDAYLNAVVGTALIKKYPKLESEFVYGDYKVYDVRKMLAKSEQEIGKATAKYFFYSNIMNFFKTEITLANGEIRKRPLIETNGETGEIVWDKGRDFATVRKVLSMPQVNIVKKTEVQTGGFSKESILPKRNSDKLIARKKDWDPKKYGGFDSPTVAYSVLVVAKVEKGKSKKLKSVKELLGITIMERSSFEKNPIDFLEAKGYKEVRKDLIIKLPKYSLFELENGRKRMLASAGELQKGNELALPSKYVNFLYLASHYEKLKGSPEDNEQKQLFVEQHKHYLDEIIEQISEFSKRVILADANLDKVLSAYNKHRDKPIREQAENIIHLFTLTNLGAPTAFKYFDTTIDRKRYTSTKEVLDATFIHQSITGLYETRIDLSQLGGD

SEQ ID NO: 34 - protein, 1193 aa, Streptococcus pyogenes
PDNSDVDKLFIQLVQTYNQLFEENPINASGVDAKAILSARLSKSRRLENLIAQLPGEKKNGLFGNLIALSLGLTPNFKSNFDLAEDAKLQLSKDTYDDDLDNLLAQIGDQYADLFLAAKNLSDAILLSDILRVNTEITKAPLSASMIKRYDEHHQDLTLLKALVRQQLPEKYKEIFFDQSKNGYAGYIDGGASQEEFYKFIKPILEKMDGTEELLVKLNREDLLRKQRTFDNGSIPHQIHLGELHAILRRQEDFYPFLKDNREKIEKILTFRIPYYVGPLARGNSRFAWMTRKSEETITPWNFEEVVDKGASAQSFIERMTNFDKNLPNEKVLPKHSLLYEYFTVYNELTKVKYVTEGMRKPAFLSGEQKKAIVDLLFKTNRKVTVKQLKEDYFKKIECFDSVEISGVEDRFNASLGTYHDLLKIIKDKDFLDNEENEDILEDIVLTLTLFEDREMIEERLKTYAHLFDDKVMKQLKRRRYTGWGRLSRKLINGIRDKQSGKTILDFLKSDGFANRNFMQLIHDDSLTFKEDIQKAQVSGQGDSLHEHIANLAGSPAIKKGILQTVKVVDELVKVMGRHKPENIVIEMARENQTTQKGQKNSRERMKRIEEGIKELGSQILKEHPVENTQLQNEKLYLYYLQNGRDMYVDQELDINRLSDYDVDHIVPQSFLKDDSIDNKVLTRSDKNRGKSDNVPSEEVVKKMKNYWRQLLNAKLITQRKFDNLTKAERGGLSELDKAGFIKRQLVETRQITKHVAQILDSRMNTKYDENDKLIREVKVITLKSKLVSDFRKDFQFYKVREINNYHHAHDAYLNAVVGTALIKKYPKLESEFVYGDYKVYDVRKMIAKSEQEIGKATAKYFFYSNIMNFFKTEITLANGEIRKRPLIETNGETGEIVWDKGRDFATVRKVLSMPQVNIVKKTEVQTGGFSKESILPKRNSDKLIARKKDWDPKKYGGFDSPTVAYSVLVVAKVEKGKSKKLKSVKELLGITIMERSSFEKNPIDFLEAKGYKEVKKDLIIKLPKYSLFELENGRKRMLASAGELQKGNELALPSKYVNFLYLASHYEKLKGSPEDNEQKQLFVEQHKHYLDEIIEQISEFSKRVILADANLDKVLSAYNKHRDKPIREQAENIIHLFTLTNLGAPAAFKYFDTTIDRKRYTSTKEVLDATLIHQSITGLYETRIDLSQLGGD

SEQ ID NO: 35 - protein, 1368 aa, Streptococcus pyogenes
MDKKYSIGLDIGTNSVGWAVITDDYKVPSKKFKVLGNTDRHSIKKNLIGALLFDSGETAEATRLKRTARRRYTRRKNRICYLQEIFSNEMAKVDDSFFHRLEESFLVEEDKKHERHPIFGNIVDEVAYHEKYPTIYHLRKKLADSTDKADLRLIYLALAHMIKFRGHFLIEGDLNPDNSDVDKLFIQLVQTYNQLFEENPINASRVDAKAILSARLSKSRRLENLIAQLPGEKKNGLFGNLIALSLGLTPNFKSNFDLAEDAKLQLSKDTYDDDLDNLLAQIGDQYADLFLAAKNLSDATLLSDILRVNSEITKAPLSASMIKRYDEHHQDLTLLKALVRQQLPEKYKEIFFDQSKNGYAGYIDGGASQEEFYKFIKPILEKMDGTEELLAKLNREDLLRKQRTFDNGSIPHQIHLGELHAILRRQEDFYPFLKDNREKIEKILTFRIPYYVGPLARGNSRFAWMTRKSEETITPWNFEEVVDKGASAQSFIERMTNFDKNLPNEKVLPKHSLLYEYFTVYNELTKVKYVTEGMRKPAFLSGEQKKAIVDLLFKTNRKVTVKQLKEDYFKKIECFDSVEISGVEDRFNASLGTYHDLLKIIKDKDFLDNEENEDILEDIVLTLTLFEDREMIEERLKTYAHLFDDKVMKQLKRRRYTGWGRLSRKLINGIRDKQSGKTILDFLKSDGFANRNFMQLIHDDSLTFKEDIQKAQVSGQGDSLHEHIANLAGSPAIKKGILQTVKVVDELVKVMGRHKPENIVIEMARENQTTQKGQKNSRERMKRIEEGIKELGSDILKEYPVENTQLQNEKLYLYYLQNGRDMYVDQELDINRLSDYDVDHIVPQSFLKDDSIDNKVLTRSDKNRGKSDNVPSEEVVKKMKNYWRQLLNAKLITQRKFDNLTKAERGGLSELDKAGFIKRQLVETRQITKHVAQILDSRMNTKYDENDKLIREVKVITLKSKLVSDFRKDFQFYKVREINNYHHAHDAYLNAVVGTALIKKYPKLESEFVYGDYKVYDVRKMIAKSEQEIGKATAKYFFYSNIMNFFKTEITLANGEIRKRPLIETNGETGEIVWDKGRDFATVRKVLSMPQVNIVKKTEVQTGGFSKESILPKRNSDKLIARKKDWDPKKYGGFDSPTVAYSVLVVAKVEKGKSKKLKSVKELLGITIMERSSFEKNPIDFLEAKGYKEVRKDLIIKLPKYSLFELENGRKRMLASAGELQKGNELALPSKYVNFLYLASHYEKLKGSPEDNEQKQLFVEQHKHYLDEIIEQISEFSKRVILADANLDKVLSAYNKHRDKPIREQAENIIHLFTLTNLGAPAAFKYFDTTIDRKRYTSTKEVLDATLIHQSITGLYETRIDLSQLGGD

SEQ ID NO: 36 - protein, 1367 aa, Streptococcus pyogenes
MDKKYSIGLDIGTNSVGWAVITDDYKVPSKKFKVLGNTDRHSIKKNLIGALLFDSGETAEATRLKRTARRRYTRRKNRICYLQEIFSNEMAKVDDSFFHRLEESFLVEEDKKHERHPIFGNIVDEVAYHEKYPTIYHLRKKLADSTDKVDLRLIYLALAHMIKFRGHFLIEGDLNPDNSDVDKLFIQLVQTYNQLFEENPINASRVDAKAILSARLSKSRRLENLIAQLPGEKKNGLFGNLIALSLGLTPNFKSNFDLAEDTKLQLSKDTYDDDLDNLLAQIGDQYADLFLAAKNLSDAILLSDILRVNSEITKAPLSASMIKRYDEHHQDLTLLKALVRQQLPEKYKEIFFDQSKNGYAGYIDGGASQEEFYKFIKPILEKMDGTEELLAKLNREDLLRKQRTFDNGSIPYQIHLGELHAILRRQEDFYPFLKDNREKIEKILTFRIPYYVGPLARGNSRFAWMTRKSEETITPWNFEEVVDKGASAQSFIERMTNFDKNLPNEKVLPKHSLLYEYFTVYNELTKVKYVTEGMRKPAFLSGEQKKAIVDLLFKTNRKVTVKQLKEDYFKKIECFDSVEISGVEDRFNTSLGTYHDLLKIIKDKDFLDNEENEDILEDIVLTLTLFEDKEMIEERLKKYANLFDDKVMKQLKRRHYTGWGRLSRKLINGIRDKQSGKTILDFLKSDGFANRNFMQLINDDSLTFKEAIQKAQVSGQGHSLHEQIANLAGSPAIKKGILQTVKIVDELVKVMGHKPENIVIEMARENQTTQKGQKNSRERMKRIEEGIKELGSQILKEHPVENTQLQNEKLYLYYLQNGRDMYVDQELDINRLSDYDVDHIVPQSFLKDDSIDNKVLTRSDKNRGKSDNVPSEEVVKKMKNYWRQLLNAKLITQRKFDNLTKAERGGLSELDKAGFIKRQLVETRQITKHVAQILDSRMNTKYDENDKLIREVKVITLKSKLVSDFRKDFQFYKVREINNYHHAHDAYLNAVVGTALIKKYPKLESEFVYGDYKVYDVRKMIAKSEQEIGKATAKYFFYSNIMNFFKTEITLANGEIRKRPLIETNGETGEIVWDKGRDFATVRKVLSMPQVNIVKKTEVQTGGFSKESILPKRNSDKLIARKKDWDPKKYGGFDSPTVAYSVLVVAKVEKGKSKKLKSVKELLGITIMERSSFEKNPIDFLEAKGYKEVRKDLIIKLPKYSLFELENGRKRMLASAGELQKGNELALPSKYVNFLYLASHYEKLKGSPEDNEQKQLFVEQHKHYLDEIIEQISEFSKRVILADANLDKVLSAYNKHRDKPIREQAKNIIHLFTLTNLGAPAAFKYFDTTIERNRYKSIKEVLDATLIHQSITGLYETRIDLSQLGGD

SEQ ID NO: 37 - protein, 1368 aa, Streptococcus pyogenes
MDKKYSIGLDIGTNSVGWAVITDDYKVPSKKFKVLGNTDRHSIKKNLIGALLFDSGETAEATRLKRTARRRYTRRKNRICYLQEIFSNEMAKVDDSFFHRLEESFLVEEDKKHERHPIFGNIVDEVAYHEKYPTIYHLRKKLADSTDKADLRLIYLALAHMIKFRGHFLIEGDLNPDNSDVDKLFIQLVQTYNQLFEENLINASRVDAKAILSARLSKSRRLENLIAQLPGEKRNGLFGNLIALSLGLTPNFKSNFDLAEDAKLQLSKDTYDDDLDNLLAQIGDQYADLFLAAKNLSDAILLSDILRVNSEITKAPLSASMIKRYDEHHQDLTLLKALVRQQLPEKYKEIFFDQSKNGYAGYIDGGASQEEFYKFIKPILEKMDGTEELLAKLNREDLLRKQRTFDNGSIPHQIHLGELHAILRRQEDFYPFLKDNREKIEKILTFRIPYYVGPLARGNSRFAWMTRKSEETITPWNFEEVVDKGASAQSFIERMTNFDKNLPNEKVLPKHSLLYEYFTVYNELTKVKYVTEGMRKPAFLSGEQKKAIVDLLFKTNRKVTVKQLKEDYFKKIECFDSVEISGVEDRFNASLGTYHDLLKIIKDKDFLDNEENEDILEDIVLTLTLFEDREMIEERLKTYAHLFDDKVMKQLKRRRYTGWGRLSRKLINGIRDKQSGKTILDFLKSDGFANRNFMQLIHDDSLTFKEDIQKAQVSGQGDSLHEHIANLAGSPAIKKGILQTVKIVDELVKVMGRHKPENIVIEMARENQTTQKGQKNSRERMKRIEEGIKELGSDILKEYPVENTQLQNEKLYLYYLQNGRDMYVDQELDINRLSDYDVDHIVPQSFLKDDSIDNKVLTRSDKNRGKSDNVPSEEVVKKMKNYWKQLLNAKLITQRKFDNLTKAERGGLSELDKAGFIKRQLVETRQITKHVAQILDSRMNTKYDENDKLIREVKVITLKSKLVSDFRKDFQFYKVREINNYHHAHDAYLNAVVGTALIKKYPKLESEFVYGDYKVYDVRKMIAKSEQEIGKATAKYFFYSNIMNFFKTEITLANGEIRKRPLIETNGETGEIVWDKGRDFATVRKVLSMPQVNIVKKTEVQTGGFSKESILPKRNSDKLIARKKDWDPKKYGGFDSPTVAYSVLVVAKVEKGKSKKLKSVKELLGITIMERSSFEKNPIDFLEAKGYKEVRKDLIIKLPKYSLFELENGRKRMLASAGELQKGNELALPSKYVNFLYLASHYEKLKGSPEDNEQKQLFVEQHKHYLDEIIEQISEFSKRVILADANLDKVLSAYNKHRDKPIREQAENIIHLFTLTNLGAPAAFKYFDTTIGRNRYKSIKEVLDATLIHQSITGLYETRIDLSQLGGD

SEQ ID NO: 38 - protein, 1279 aa, Streptococcus pyogenes
MAKVDDSFFHRLEESFLVEEDKKHERHPIFGNIVDEVAYHEKYPTIYHLRKKLVDSTDKADLRLIYLALAHMIKFRGHFLIEGDLNPDNSDVDKLFIQLVQTYNQLFEENPINASGVDAKAILSARLSKSRRLENLIAQLPGEKKNGLFGNLIALSLGLTPNFKSNFDLAEDAKLQLSKDTYDDDLDNLLAQIGDQYADLFLAAKNLSDAILLSDILRVNTEITKAPLSASMIKRYDEHHQDLTLLKALVRQQLPEKYKEIFFDQSKNGYAGYIDGGASQEEFYKFIKPILEKMDGTEELLVKLNREDLLRKQRTFDNGSIPHQIHLGELHAILRRQEDFYPFLKDNREKIEKILTFRIPYYVGPLARGNSRFAWMTRKSEETITPWNFEEVVDKGASAQSFIERMTNFDKNLPNEKVLPKHSLLYEYFTVYNELTKVKYVTEGMRKPAFLSGEQKKAIVDLLFKTNRKVTVKQLKEDYFKKIECFDSVEISGVEDRFNASLGTYHDLLKIIKDKDFLDNEENEDILEDIVLTLTLFEDREMIEERLKTYAHLFDDKVMKQLKRRRYTGWGRLSRKLINGIRDKQSGKTILDFLKSDGFANRNFMQLIHDDSLTFKEDIQKAQVSGQGDSLHEHIANLAGSPAIKKGILQTVKVVDELVKVMGRHKPENIVIEMARENQTTQKGQKNSRERMKRIEEGIKELGSQILKEHPVENTQLQNEKLYLYYLQNGRDMYVDQELDINRLSDYDVDHIVPQSFLKDDSIDNKVLTRSDKNRGKSDNVPSEEVVKKMKNYWRQLLNAKLITQRKFDNLTKAERGGLSELDKAGFIKRQLVETRQITKHVAQILDSRMNTKYDENDKLIREVKVITLKSKLVSDFRKDFQFYKVREINNYHHAHDAYLNAVVGTALIKKYPKLESEFVYGDYKVYDVRKMIAKSEQEIGKATAKYFFYSNIMNFFKTEITLANGEIRKRPLIETNGETGEIVWDKGRDFATVRKVLSMPQVNIVKKTEVQTGGFSKESILPKRNSDKLIARKKDWDPKKYGGFDSPTVAYSVLVVAKVEKGKSKKLKSVKELLGITIMERSSFEKNPIDFLEAKGYKEVKKDLIIKLPKYSLFELENGRKRMLASAGELQKGNELALPSKYVNFLYLASHYEKLKGSPEDNEQKQLFVEQHKHYLDEIIEQISEFSKRVILADANLDKVLSAYNKHRDKPIREQAENIIHLFTLTNLGAPAAFKYFDTTIDRKRYTSTKEVLDATLIHQSITGLYETRIDLSQLGGD

SEQ ID NO: 39 - protein, 543 aa, Streptococcus pyogenes MGAS2111
QELDINRLSGYDVDHIVPQSFLKDDSIDNKVLTRSDKNRGKSDNVPSEEVVKKMKNYWRQLLNAKLITQRKFDNLTKAERGGLSELDKVGFIKRQLVETRQITKHVAQILDSRMNTKYDENDKLIREVRVITLKSKLVSDFRKDFQFYKVREINNYHHAHDAYLNAVVGTALIKKYPKLESEFVYGDYKVYDVRKMIAKSEQEIGKATAKYFFYSNIMNFFKTEITLANGEIRKRPLIETNGETGEIVWDKGRDFATVRKVLSMPQVNIVKKTEVQTGGFSKESILPKRNSDKLIARKKDWDPKKYGGFDSPTVAYSVLVVAKVEKGKSKKLKSVKELLGITIMERSSFEKDPIDFLEAKGYKEVRKDLIIKLPKYSLFELENGRKRMLASAGELQKGNELALPSKYVNFLYLASHYEKLKGSPEDNEQKQLFVEQHKHYLDEIIEQISEFSKRVILADANLDKVLSAYNKHRDKPIREQAENIIHLFTLTNLGAPAAFKYFDTTIDRKRYTSTKEVLDATLIHQSITGLYETRIDLSQLGGD

SEQ ID NO: 40 - protein, 306 aa, Streptococcus pyogenes SS1447
IETNGETGEIVWDKGRDFATVRKVLSMPQVNIVKKTEVQTGGFSKESILPKRNSDKLIARKKDWDPKKYGGFDSPTVAYSVLVVAKVEKGKSKKLKSVKELLGITIMERSSFEKDPIDFLEAKGYKEVRKDLIIKLPKYSLFELENGRKRMLASAGELQKGNELALPSKYVNFLYLASHYEKLKGSPEDNEQKQLFVEQHKHYLDEIIEQISEFSKRVILADANLDKVLSAYNKHRDKPIREQAENIIHLFTLTNLGAPAAFKYFDTTIDRKRYTSTKEVLDATLIHQSITGLYETRIDLSQLGGD

SEQ ID NO: 41 - protein, 1368 aa, Streptococcus pyogenes
MDKKYSIGLDIGTNSVGWAVITDDYKVPSKKFKVLGNTDRHSIKKNLIGALLFDSGEIAEATRLKRTARRRYTRRKNRICYLQEIFSNEMAKVDDSFFHRLEESFLVEEDKKHERHPIFGNIVDEVAYHEKYPTIYHLRKKLVDSTDKADLRLIYLALAHMIKFRGHFLIEGDLNPDNSDVDKLFIQLVQTYNQLFEENPINASGVDAKAILSARLSKSRRLENLIAQLPGEKKNGLFGNLIALSLGLTPNFKSNFDLAEDAKLQLSKDTYDDDLDNLLAQIGDQYADLFLAAKNLSDAILLSDILRLNSEITKAPLSASMIKRYDEHHQDLTLLKALVRQQLPEKYKEIFFDQSKNGYAGYIDGGASQEEFYKFIKPILEKMDGTEELLAKLNREDLLRKQRTFDNGSIPHQIHLGELHAILRRQEDFYPFLKDNREKIEKILTFRIPYYVGPLARGNSRFAWMTRKSEETITPWNFEEVVDKGASAQSFIERMTNFDKNLPNEKVLPKHSLLYEYFTVYNELTKVKYVTEGMRKPAFLSGEQKKAIVDLLFKTNRKVTVKQLKEDYFKKIECFDSVEISGVEDRFNASLGTYHDLLKIIKDKDFLDNEENEDILEDIVLTLTLFEDREMIEERLKTYAHLFDDKVMKQLKRRRYTGWGRLSRKLINGIRDKQSGKTILDFLKSDGFANRNFMQLIHDDSLTFKEDIQKAQVSGQGDSLHEHIANLAGSPAIKKGILQTVKVVDELVKVMGRHKPENIVIEMARENQTTQKGQKNSRERMKRIEEGIKELGSQILKEHPVENTQLQNEKLYLYYLQNGRDMYVDQELDINRLSDYDVDHIVPQSFIKDDSIDNKVLTRSDKNRGKSDNVPSEEVVKKMKNYWRQLLNAKLITQRKFDNLTKAERGGLSELDKAGFIKRQLVETRQITKHVAQILDSRMNTKYDENDKLIREVKVITLKSKLVSDFRKDFQFYKVREINNYHHAHDAYLNAVVGTALIKKYPKLESEFVYGDYKVYDVRKMLAKSEQEIGKATAKYFFYSNIMNFFKTEITLANGEIRKRPLIETNGETGEIVWDKGRDFATVRKVLSMPQVNIVKKTEVQTGGFSKESILPKRNSDKLIARKKDWDPKKYGGFDSPTVAYSVLVVAKVEKGKSKKLKSVKELLGITIMERSSFEKNPIDFLEAKGYKEVRKDLIIKLPKYSLFELENGRKRMLASAGELQKGNELALPSKYVNFLYLASHYEKLKGSPEDNEQKQLFVEQHKHYLDEIIEQISEFSKRVILADANLDKVLSAYNKHRDKPIREQAENIIHLFTLTNLGAPTAFKYFDTTIDRKRYTSTKEVLDATFIHQSITGLYETRIDLSQLGGD

SEQ ID NO: 42 - protein, 1345 aa, Streptococcus
MDQKYSIGLDIGTNSVGWAVVTDDYKVPAKKMKVLGNTDKQSIKKNLLGALLFDSGETAEATRLKRTARRRYTRRRNRLRYLQEIFAEEMNKVDENFFQRLDDSFLVDEDKRGERHPIFGNIAAEVKYHDDFPTIYHLRKHLADISQKADLRLVYLALAHMIKFRGHFLIEGQLKAENTNVQALFKDFVEVYDKTVEESHLSEMTVDALSILTEKVSKSRRLENLIAHYPAEKKNTLFGNLIALSLGLQPNFKTNFQLSEDAKLQFSKDTYEEDLEGLLGEIGDEYADLFASAKNLYDAILLSGILTVDDNSTKAPLSASMVKRYEEHQKDLKKLKDFIKVNAPDQYNAIFKDKNKKGYAGYIENGVKQDEFYKYLKGILLQINGSGDFLDKIDREDFLRKQRTFDNGSIPHQIHLQEMHAILRRQEEHYPFLKENQDKIEKILTFRIPYYVGPLARKGSRFAWAEYKADEKITPWNFDDILDKEKSAEKFITRMTLNDLYLPEEKVLPKHSLLYETFTVYNELTKVKYVNEQGEAKFFDANMKQEIFDHVFKENRKVTKDKLLNYLNKEFEEFRIVNLTGLDKENKAFNSSLGTYHDLRKILDKSFLDDKANEKTIEDIIQTLTLFEDREMIRQRLQKYSDIFTKAQLKKLERRHYTGWGRLSYKLINGIRNKENKKTILDYLIDDGYANRNFMQLINDDALSFKEEIARAQIIGDVDDIANVVHDLPGSPAIKKGILQSVKIVDELVKVMGHNPANIIIEMARENQMTDKGRRNSQQRLKLLQDSLKNLDNPVNIKNVENQQLQNDRLFLYYIQNGKDMYTGETLDINNLSQYDIDHIIPQAFIKDNSLDNRVLTRSDKNRGKSDDVPSIEVVHEMKSFWSKLLSVKLITQRKFDNLTKAERGGLTEEDKAGFIKRQLVETRQITKHVAQILDERFNTEFDGNKRRIRNVKIITLKSNLVSNFRKEFELYKVREINDYHHAHDAYLNAVVGNALLLKYPQLEPEFVYGEYPKYNSYRSRKSATEKFLFYSNILRFFKKEDIQTNEDGEIAWNKEKHIKILRKVLSYPQVNIVKKTEEQTGGFSKESILPKGESDKLIPRKTKNSYWNPKKYGGFDSPVVAYSILVFADVEKGKSKKLRKVQDMVGITIMEKKRFEKHPVDFLEQRGYRNVRLEKIIKLPKYSLFELENKRRRLLASARELQKGNELVIPQRFTTLLYHSYQIEKNYEPEHREYVEKHKDEFKELLEYISVFSRKYVLADNNLTKIEMLFSKNKDAEVSSLAKSFISLLTFTAFGAPAAFNFFGENIDRKRYTSVTECLNATLIHQSITGLYETRIDLSKLGED

SEQ ID NO: 43 - protein, 1373 aa, Streptococcus
MTKKNYSIGLDIGTNSVGWAVITDDYKVPAKKMKVLGNTDKKYIKKNLLGALLFDSGETAEATRLKRTARRRYTRRKNRLRYLQEIFAEEMTKVDESFFQRLDESFLRWDDDNKKLGRYPIFGNKADVVKYHQEFPTIYHLRKHLADSSEKADLRLVYLALAHMIKFRGHFLIEGELNAENTDVQKIFADFVGVYDRTFDDSHLSEITVDAASILTEKISKSRRLENLIKYYPTEKKNTLFGNLIALALGLQPNFKMNFKLSEDAKLQFSKDSYEEDLGELLGKIGDDYADLFTSAKNLYDAILLSGILIVDDNSTKAPLSASMIKRYVEHQEDLEKLKEFIKANKSELYHDIFKDKNKNGYAGYIENGVKQDEFYKYLKNTLSKIAGSDYFLDKIEREDFLRKQRTFDNGSIPHQIHLQEMHAILRRQGDYYPFLKENQDRIEKILTFRIPYYVGPLARKDSRFSWAEYHSDEKITPWNFDKVIDKEKSAEKFITRMTLNDLYLPEEKVLPKHSHVYETYAVYNELTKIKYVNEQGKDSFFDSNMKQEIFDHVFKENRKVTKEKLLNYLNKEFPEYRIKDLIGLDKENKSFNASLGTYHDLKKILDKAFLDDKVNEEVIEDIIKTLTLFEDKDMIHERLQKYSDIFTADQLKKLERRHYTGWGRLSYKLINGIRNKENNKTILDYLIDDGSANRNFMQLINDDTLPFKQIIQKSQVVGDVDDIEAVVHDLPGSPAIKKGILQSVKIVDELVKVMGDNPDNIVIEMARENQTTNRGRSQSQQRLKKLQNSLKELGSNILNEEKPSYIEDKVENSHLQNDQLFLYYIQNGKDMYTGDELDIDHLSDYDIDHIIPQAFIKDDSIDNRVLTSSAKNRGKSDDVPSLDIVRARKAEWVRLYKSGLISKRKFDNLTKAERGGLTEADKAGFIKRQLVETRQITKHVAQILDARFNTESDENDKVIRDVKVITLKSNLVSQFRKDFEFYKVREINDYHHAHDAYLNAVVGTALLKKYPKLASEFVYGEYKKYDIRKFITNSSDKATAKYFFYSNLMNFFKRVIRYSNGKVIVRPVVEYSKDTEDIAWDKKSNFRTICKVLSYPQVNIVKKVETQTGGFSKESILPKGDSDKLIPRKTKKAYWDTKKYGGFDSPTVAYSVFVVADVEKGKAKKLKTVKELVGISIMERSFFEENPVEFLENKGYHNIREDKLIKLPKYSLFEFEGGKRRLLASASELQKGNEMVIPGHLVKLLYHAQRINSFNSTKYLDYVSAHKKEFEKVLSCVEDFANLYVDVEKNLSKIRAVADSMDNFSIEEISNSFINLLTLTALGAPADFNFLGEKIPRKRYTSTKECLNATLIHQSITGLYETRIDLSKIGEE

SEQ ID NO: 44 - protein, 1370 aa, Streptococcus agalactiae
MNKPYSIGLDIGTNSVGWSIITDDYKVPAKKIRVLGNTDKEYIKKNLIGALLFDGGNTAADRRLKRTARRRYTRRRNRILYLQEIFAEEMSKVDDSFFHRLEDSFLVEEDKRGSKYPIFATLQEEKYYHEKFPTIYHLRKELADKKEKADLRLVYLALAHIIKFRGHFLIEDDRFDVRNTDIQKQYQAFLEIFDTTFENNDLLSQDVDVEAILTDKISKSAKKDRILAQYPNQKSTGIFAEFLKLIVGNQADFKKHFNLEDKTPLQFAKDSYDEDLENLLGQIGDEFADLFSAAKKLYDSVLLSGILTVTDLSTKAPLSASMIQRYDEHREDLKQLKQFVKASLPEKYQEIVADSSKDGYAGYIEGKTNQEAFYKYLSKLLTKQEGSEYFLEKIKNEDFLRKQRTFDNGSIPHQVHLTELRAIIRRQSEYYPFLKENLDRIEKILTFRIPYYVGPLAREKSDFAWMTRKTDDSIRPWNFEDLVDKEKSAEAFIHRMTNNDLYLPEEKVLPKHSLIYEKFTVYNELTKVRFLAEGFKDFQFLNRKQKETIFNSLFKEKRKVTEKDIISFLNKVDGYEGIAIKGIEKQFNASLSTYHDLKKILGKDFLDNTDNELILEDIVQTLTLFEDREMIKKRLDIYKDFFTESQLKKLYRRHYTGWGRLSAKLINGIRNKENQKTILDYLIDDGSANRNFMQLIKDAGLSFKPIIDKARTGSHSDNLKEVIGELAGSPAIKKGILQSLKIVDELVKVMGYEPEQIVVEMARENQTTAKGLSRSRQRLTTLRESLANLKSNILEEKKPKYVKDQVENHHLSDDRLFLYYLQNGKDMYTDDELDIDNLSQYDIDHIIPQAFIKDDSIDNRVLVSSAKNRGKSDDVPSLEIVKDCKVFWKKLLDAKLMSQRKYDNLTKAERGGLTSDDKARFIQRQLVETRQITKHVARILDERFNNELDSKGRRIRKVKIVTLKSNLVSNFRKEFVFYKIREVNNYHHAHDAYLNAVVAKAILTKYPQLEPEFVYGDYPKYNSYKTRKSATEKLFFYSNIMNFFKTKVTLADGTVVVKDDIEVNNDTGEIVWDKKKHFATVRKVLSYPQVNIVKKTEIQTGGFSKESILAHGNSDKLIPRKTKDIYLDPKKYGGFDSPIVAYSVLVVADIKKGKAQKLKTVTELLGITIMERSRFEKNPSAFLESKGYLNIRTDKLIILPKYSLFELENGRRRLLASAGELQKGNELALPTQFMKFLYLASRYNESKGKPEEIEKKQEFVNQHVSYFDDIFQIINDFSKRVILADANLEKINRLYQDNKENIPVDELANNIINLFTFTSLGAPAAFKFFDKIVDRKRYTSTKEVLNSTLIHQSITGLYETRIDLGKLGED

SEQ ID NO: 45 - protein, 1378 aa, Streptococcus agalactiae
MNKPYSIGLDIGTNSVGWSIITDDYKVPAKKMRVLGNTDKEYIKKNLIGALLFDGGNTAADRRLKRTARRRYTRRRNRILYLQEIFAEEMSKVDDSFFHRLEDSFLVEEDKRGSKYPIFATLQEEKDYHEKFPTIYHLRKELADKQEKADLRLIYLALAHIIKFRGHFLIEDDRFDVRNTDIQKQYQAFLEIFDTTFENNHLLSQNVDVEAILTDKISKSAKKDRILAQYPNQKSTGIFAEFLKLIVGNQADFKKHFNLEDKTPLQFAKDSYDEDLENLLGQIGDEFADLFSAAKKLYDSVLLSGILTVIDLSTKAPLSASMIQRYDEHREDLKQLKQFVKASLPEKYQEIFADSSKDGYAGYIEGKTNQEAFYKYLSKLLTKQEDSENFLEKIKNEDFLRKQRTFDNGSIPHQVHLTELKAIIRRQSEYYPFLKENQDRIEKILTFRIPYYIGPLAREKSDFAWMTRKTDDSIRPWNFEDLVDKEKSAEAFIHRMTNNDFYLPEEKVLPKHSLIYEKFTVYNELTKVRYKNEQGETYFFDSNIKQEIFDGVFKEHRKVSKKKLLDFLAKEYEEFRIVDVIGLDKENKAFNASLGTYHDLEKILDKDFLDNPDNESILEDIVQTLTLFEDREMIKKRLENYKDLFTESQLKKLYRRHYTGWGRLSAKLINGIRDKESQKTILDYLIDDGRSNRNFMQLINDDGLSFKSIISKAQAGSHSDNLKEVVGELAGSPAIKKGILQSLKIVDELVKVMGYEPEQIVVEMARENQTTNQGRRNSRQRYKLLDDGVKNLASDLNGNILKEYPTDNQALQNERLFLYYLQNGRDMYTGEALDIDNLSQYDIDHIIPQAFIKDDSIDNRVLVSSAKNRGKSDDVPSLEIVKDCKVFWKKLLDAKLMSQRKYDNLTKAERGGLTSDDKARFIQRQLVETRQITKHVARILDERFNNELDSKGRRIRKVKIVTLKSNLVSNFRKEFGFYKIREVNDYHHAHDAYLNAVVAKAILTKYPQLEPEFVYGLYRRKKLSKIVREDKEEKYSEATRKMFFYSNLMNMFKRVVRLADGSIVVRPVIETGRYMGKTAWDKKKHFATVRKVLSYPQVNIVKKTEIQTGGFSKESILAHGNSDKLIPRKTKDIYLDPKKYGGFDSPIVAYSVLVVADIKKGKAQKLKTVTELLGITIMERSKFEKNPSAFLESKGYLNIRDDKLMILPKYSLFELENGRRRLLASAGELQKGNELALPTQFMKFLYLASRYNESKGKPEEIEKKQEFVNQHVSYFDDILQLINDFSKRVILADANLEKINKLYQDNKENISVDELANNIINLFTFTSLGAPAAFKFFDKIVDRKRYTSTKEVLNSTLIHQSITGLYETRIDLSKLGED

SEQ ID NO: 46 - protein, 1370 aa, Streptococcus agalactiae
MNKPYSIGLDIGTNSVGWSIITDDYKVPAKKMRVLGNTDKEYIKKNLIGALLFDGGNTAADRRLKRTARRRYTRRRNRILYLQEIFAEEMSKVDDSFFHRLEDSFLVEEDKRGSKYPIFATLQEEKDYHEKFSTIYHLRKELADKKEKADLRLIYIALAHIIKFRGHFLIEDDSFDVRNTDISKQYQDFLEIFNITFENNDLLSQNVDVEAILTDKISKSAKKDRILAQYPNQKSTGIFAEFLKLIVGNQADFKKYFNLEDKTPLQFAKDSYDEDLENLLGQIGDEFADLFSAAKKLYDSVLLSGILTVIDLSTKAPLSASMIQRYDEHREDLKQLKQFVKASLPEKYQEIFADSSKDGYAGYIEGKTNQEAFYKYLSKLLTKQEDSENFLEKIKNEDFLRKQRTFDNGSIPHQVHLTELKAIIRRQSEYYPFLKENQDRIEKILTFRIPYYIGPLAREKSDFAWMTRKTDDSIRPWNFEDLVDKEKSAEAFIHRMTNNDFYLPEEKVLPKHSLIYEKFTVYNELTKVRYKNEQGETYFFDSNIKQEIFDGVFKEHRKVSKKKLLDFLAKEYEEFRIVDVIGLDKENKAFNASLGTYHDLEKILDKDFLDNPDNESILEDIVQTLTLFEDREMIKKRLENYKDLFTESQLKKLYRRHYTGWGRLSAKLINGIRDKESQKTILDYLIDDGRSNRNFMQLINDDGLSFKSIISKAQAGSHSDNLKEVVGELAGSPAIKKGILQSLKIVDELVKVMGYEPEQIVVEMARENQTTNQGRRNSRQRYKLLDDGVKNLASDLNGNILKEYPTDNQALQNERLFLYYLQNGRDMYTGEALDIDNLSQYDIDHIIPQAFIKDDSIDNRVLVSSAKNRGKSDDVPSLEIVKDCKVFWKKLLDAKLMSQRKYDNLTKAERGGLTSDDKARFIQRQLVETRQITKHVARILDERFNNELDSKGRRIRKVKIVTLKSNLVSNFRKEFGFYKIREVNNYHHAHDAYLNAVVAKAILTKYPQLEPEFVYGDYPKYNSYKTRKSATEKLFFYSNIMNFFKTKVTLADGTVVVKDDIEVNNDTGEIVWDKKKHFATVRKVLSYPQNNIVKKTEIQTGGFSKESILAHGNSDKLIPRKTKDIYLDPKKYGGFDSPIVAYSVLVVADIKKGKAQKLKTVTELLGITIMERSRFEKNPSAFLESKGYLNIRADKLIILPKYSLFELENGRRRLLASAGELQKGNELALPTQFMKFLYLASRYNESKGKPEEIEKKQEFVNQHVSYFDDILQLINDFSKRVILADANLEKINKLYQDNKENISVDELANNIINLFTFTSLGAPAAFKFFDKIVDRKRYTSTKEVLNSTLIHQSITGLYETRIDLGKLGED

SEQ ID NO: 47 - protein, 1370 aa, Streptococcus agalactiae
MNKPYSIGLDIGTNSVGWSIITDDYKVPAKKMRVLGNTDKEYIKKNLIGALLFDGGNTAADRRLKRTARRRYTRRRNRILYLQEIFAEEMSKVDDSFFHRLEDSFLVEEDKRGSKYPIFATLQEEKDYHEKFSTIYHLRKELADKKEKADLRLIYIALAHIIKFRGHFLIEDDSFDVRNTDISKQYQDFLEIFNTIFENNDLLSQNVDVEAILTDKISKSAKKDRILAQYPNQKSTGIFAEFLKLIVGNQADFKKYFNLEDKTPLQFAKDSYDEDLENLLGQIGDEFADLFSAAKKLYDSVLLSGILTVIDLSTKAPLSASMIQRYDEHREDLKQLKQFVKASLPEKYQEIFADSSKDGYAGYIEGKTNQEAFYKYLSKLLTKQEDSENFLEKIKNEDFLRKQRTFDNGSIPHQVHLTELKAIIRRQSEYYPFLKENQDRIEKILTFRIPYYIGPLAREKSDFAWMTRKTDDSIRPWNFEDLVDKEKSAEAFIHRMTNNDFYLPEEKVLPKHSLIYEKFTVYNELTKVRYKNEQGETYFFDSNIKQEIFDGVFKEHRKVSKKKLLDFLAKEYEEFRIVDVIGLDKENKAFNASLGTYHDLEKILDKDFLDNPDNESILEDIVQTLTLFEDREMIKKRLENYKDLFTESQLKKLYRRHYTGWGRLSAKLINGIRDKESQKTILDYLIDDGRSNRNFMQLINDDGLSFKSIISKAQAGSHSDNLKEVVGELAGSPAIKKGILQSLKIVDELVKVMGYEPEQIVVEMARENQTTNQGRRNSRQRYKLLDDGVKNLASDLNGNILKEYPTDNQALQNERLFLYYLQNGRDMYTGEALDIDNLSQYDIDHIIPQAFIKDDSIDNRVLVSSAKNRGKSDDVPSLEIVKDCKVFWKKLLDAKLMSQRKYDNLTKAERGGLTSDDKARFIQRQLVETRQITKHVARILDERFNNELDSKGRRIRKVKIVTLKSNLVSNFRKEFGFYKIREVNNYHHAHDAYLNAVVAKAILTKYPQLEPEFVYGDYPKYNSYKTRKSATEKLFFYSNIMNFFKTKVTLADGTVVVKDDIEVNNDTGEIVWDKKKHFATVRKVLSYPQNNIVKKTEIQTGGFSKESILAHGNSDKLIPRKTKDIYLDPKKYGGFDSPIVAYSVLVVADIKKGKAQKLKTVTELLGITIMERSRFEKNPSAFLESKGYLNIRADKLIILPKYSLFELENGRRRLLASAGELQKGNELALPTQFMKFLYLASRYNESKGKPEEIEKKQEFVNQHVSYFDDILQLINDFSKRVILADANLEKINKLYQDNKENISVDELANNIINLFTFTSLGAPAAFKFFDKIVDRKRYTSTKEVLNSTLIHQSITGLYETRIDLGKLGED

SEQ ID NO: 48 - protein, 1370 aa, Streptococcus agalactiae
MNKPYSIGLDIGTNSVGWSIITDDYKVPAKKMRVLGNTDKEYIKKNLIGALLFDGGNTAADRRLKRTARRRYTRRRNRILYLQEIFAEEMSKVDDSFFHRLEDSFLVEEDKRGSKYPIFATLQEEKDYHEKFSTIYHLRKELADKKEKADLRLIYIALAHIIKFRGHFLIEDDSFDVRNTDISKQYQDFLEIFNTTFENNDLLSQNVDVEAILTDKISKSAKKDRILAQYPNQKSTGIFAEFLKLIVGNQADFKKYFNLEDKTPLQFAKDSYDEDLENLLGQIGDEFADLFSAAKKLYDSVLLSGILTVIDLSTKAPLSASMIQRYDEHREDLKQLKQFVKASLPEKYQEIFADSSKDGYAGYIEGKTNQEAFYKYLSKLLTKQEDSENFLEKIKNEDFLRKQRTFDNGSIPHQVHLTELKAIIRRQSEYYPFLKENQDRIEKILTFRIPYYIGPLAREKSDFAWMTRKTDDSIRPWNFEDLVDKEKSAEAFIHRMTNNDFYLPEEKVLPKHSLIYEKFTVYNELTKVRYKNEQGETYFFDSNIKQEIFDGVFKEHRKVSKKKLLDFLAKEYEEFRIVDVIGLDKENKAFNASLGTYHDLEKILDKDFLDNPDNESILEDIIQTLTLFEDREMIKKRLENYKDLFTESQLKKLYRRHYTGWGRLSAKLINGIRDKESQKTILDYLIDDGRSNRNFMQLINDDGLSFKSIISKAQAGSHSDNLKEVVGELAGSPAIKKGILQSLKIVDELVKVMGYEPEQIVVEMARENQTTNQGRRNSRQRYKLLDDGVKNLASDLNGNILKEYPTDNQALQNERLFLYYLQNGRDMYTGEALDIDNLSQYDIDHIIPQAFIKDDSIDNRVLVSSAKNRGKSDDVPSLEIVKDCKVFWKKLLDAKLMSQRKYDNLTKAERGGLTSDDKARFIQRQLVETRQITKHVARILDERFNNELDSKGRRIRKVKIVTLKSNLVSNFRKEFGFYKIREVNNYHHAHDAYLNAVVAKAILTKYPQLEPEFVYGDYPKYNSYKTRKSATEKLFFYSNIMNFFKTKVTLADGTVVVKDDIEVNNDTGEIVWDKKKHFATVRKVLSYPQNNIVKKTEIQTGGFSKESILAHGNSDKLIPRKTKDIYLDPKKYGGFDSPIVAYSVLVVADIKKGKAQKLKTVTELLGITIMERSRFEKNPSAFLESKGYLNIRADKLIILPKYSLFELENGRRRLLASAGELQKGNELALPTQFMKFLYLASRYNESKGKPEEIEKKQEFVNQHVSYFDDILQLINDFSKRVILADANLEKINKLYQDNKENISVDELANNIINLFTFTSLGAPAAFKFFDKIVDRKRYTSTKEVLNSTLIHQSITGLYETRIDLGKLGED

SEQ ID NO: 49 - protein, 1370 aa, Streptococcus agalactiae
MNKPYSIGLDIGTNSVGWSIITDDYKVPAKKMRVLGNTDKEYIKKNLIGALLFDGGNTAADRRLKRTARRRYTRRRNRILYLQEIFAEEMSKVDDSFFHRLEDSFLVEEDKRGSKYPIFATLQEEKDYHEKFSTIYHLRKELADKKEKADLRLIYIALAHIIKFRGHFLIEDDSFDVRNTDISKQYQDFLEIFNTTFENNDLLSQNVDVEAILTDKISKSAKKDRILAQYPNQKSTGIFAEFLKLIVGNQADFKKYFNLEDKTPLQFAKDSYDEDLENLLGQIGDEFADLFSAAKKLYDSVLLSGILTVIDLSTKAPLSASMIQRYDEHREDLKQLKQFVKASLPEKYQEIFADSSKDGYAGYIEGKTNQEAFYKYLSKLLTKQEDSENFLEKIKNEDFLRKQRTFDNGSIPHQVHLTELKAIIRRQSEYYPFLKENQDRIEKILTFRIPYYIGPLAREKSDFAWMTRKTDDSIRPWNFEDLVDKEKSAEAFIHRMTNNDFYLPEEKVLPKHSLIYEKFTVYNELTKVRYKNEQGETYFFDSNIKQEIFDGVFKEHRKVSKKKLLDFLAKEYEEFRIVDVIGLDKENKAFNASLGTYHDLEKILDKDFLDNPDNESILEDIVQTLTLFEDREMIKKRLENYKDLFTESQLKKLYRRHYTGWGRLSAKLINGIRDKESQKTILDYLIDDGRSNRNFMQLINDDGLSFKSIISKAQAGSHSDNLKEVVGELAGSPAIKKGILQSLKIVDELVKVMGYEPEQIVVEMARENQTTNQGRRNSRQRYKLLDDGVKNLASDLNGNILKEYPTDNQALQNERLFLYYLQNGRDMYTGEALDIDDLSQYDIDHIIPQAFIKDDSIDNRVLVSSAKNRGKSDDVPSLEIVKDCKVFWKKLLDAKLMSQRKYDNLTKAERGGLTSDDKARFIQRQLVETRQITKHVARILDERFNNELDSKGRRIRKVKIVTLKSNLVSNFRKEFGFYKIREVNNYHHAHDAYLNAVVAKAILTKYPQLEPEFVYGDYPKYNSYKTRKSATEKLFFYSNIMNFFKTKVTLADGTVVVKDDIEVNNDTGEIVWDKKKHFATVRKVLSYPQNNIVKKTEIQTGGFSKESILAHGNSDKLIPRKTKDIYLDPKKYGGFDSPIVAYSVLVVADIKKGKAQKLKTVTELLGITIMERSRFEKNPSAFLESKGYLNIRADKLIILPKYSLFELENGRRRLLASAGELQKGNELALPTQFMKFLYLASRYNESKGKPEEIEKKQEFVNQHVSYFDDILQLINDFSKRVILADANLEKINKLYQDNKENISVDELANNIINLFTFTSLGAPAAFKFFDKIVDRKRYTSTKEVLNSTLIHQSITGLYETRIDLGKLGED

SEQ ID NO: 50 - protein, 1370 aa, Streptococcus agalactiae
MNKPYSIGLDIGTNSVGWSIITDDYKVPAKKMRVLGNTDKEYIKKNLIGALLFDGGNTAADRRLKRTARRRYTRRRNRILYLQEIFAEEMSKVDDSFFHRLEDSFLVEEDKRGSKYPIFATLQEEKDYHEKFSTIYHLRKELADKKEKADLRLIYIALAHIIKFRGHFLIEDDSFDVRNTDISKQYQDFLEIFNTTFENNDLLSQNVDVEAILTDKISKSAKKDRILAQYPNQKSTGIFAEFLKLIVGNQADFKKYFNLEDKTPLQFAKDSYDEDLENLLGQIGDEFADLFSAAKKLYDSVLLSGILTVIDLSTKAPLSASMIQRYDEHREDLKQLKQFVKASLPEKYQEIFADSSKDGYAGYIEGKTNQEAFYKYLSKLLTKQEDSENFLEKIKNEDFLRKQRTFDNGSIPHQVHLTELKAIIRRQSEYYPFLKENQDRIEKILTFRIPYYIGPLAREKSDFAWMTRKTDDSIRPWNFEDLVDKEKSAEAFIHRMTNNDFYLPEEKVLPKHSLIYEKFTVYNELTKVRYKNEQGETYFFDSNIKQEIFDGVFKEHRKVSKKKLLDFLAKEYEEFRIVDVIGLDKENKAFNASLGTYHDLEKILDKDFLDNPDNESILEDIVQTLTLFEDREMIKKRLENYKDLFTESQLKKLYRRHYTGWGRLSAKLINGIRDKESQKTILDYLIDDGRSNRNFMQLINDDGLSFKSIISKAQAGSHSDNLKEVVGELAGSPAIKKGILQSLKIVDELVKVMGYEPEQIVVEMARENQTTNQGRRNSRQRYKLLDDGVKNLASDLNGNILKEYPTDNQALQNERLFLYYLQNGRDMYTGEALDIDNLSQYDIDHIIPQAFIKDDSIDNRVLVSSAKNRGKSDDVPSLEIVKDCKVFWKKLLDAKLMSQRKYDNLTKAERGGLTSDDKARFIQRQLVETRQITKHVARILDERFNNELDSKGRRIRKVKIVTLKSNLVSNFRKEFGFYKIREVNNYHHAHDAYLNAVVAKAILTKYPQLEPEFVYGDYPKYNSYKTRKSATEKLFFYSNIMNFFKTKVTLADGTVVVKDDIEVNNDTGEIVWDKKKHFATVRKVLSYPQNNIVKKTEIQTGGFSKESILAHGNSDKLIPRKTKDIYLDPKKYGGFDSPIVAYSVLVVADIKKGKAQKLKTVTELLGITIMERSRFEKNPSAFLESKGYLNIRADKLIILPKYSLFELENGRRRLLASAGELQKGNELALPTQFMKFLYLASRYNESKGKPEEIEKKQEFVNQHVSYFDDILQLINDFSKRVILADANLEKINKLYQDNKENISVDELANNIINLFTFTSLGAPAAFKFFDKIVDRKRYTSTKEVLNSTLIHQSITGLYETRIDLGKLGED

SEQ ID NO: 51 - protein, 1370 aa, Streptococcus agalactiae
MNKPYSIGLDIGTNSVGWSIITDDYKVPAKKMRVLGNTDKEYIKKNLIGALLFDGGNTAADRRLKRTARRRYTRRRNRILYLQEIFAEEMSKVDDSFFHRLEDSFLVEEDKRGSKYPIFATLQEEKDYHEKFSTIYHLRKELADKKEKADLRLIYIALAHIIKFRGHFLIEDDSFDVRNTDISKQYQDFLEIFNTTFENNDLLSQNVDVEAILTDKISKSAKKDRILAQYPNQKSTGIFAEFLKLIVGNQADFKKYFNLEDKTPLQFAKDSYDEDLENLLGQIGDEFADLFSAAKKLYDSVLLSGILTVIDLSTKAPLSASMIQRYDEHREDLKQLKQFVKASLPEKYQEIFADSSKDGYAGYIEGKTNQEAFYKYLSKLLTKQEDSENFLEKIKNEDFLRKQRTFDNGSIPHQVHLTELKAIIRRQSEYYPFLKENQDRIEKILTFRIPYYIGPLAREKSDFAWMTRKTDDSIRPWNFEDLVDKEKSAEAFIHRMTNNDFYLPEEKVLPKHSLIYEKFTVYNELTKVRYKNEQGETYFFDSNIKQEIFDGVFKEHRKVSKKKLLDFLAKEYEEFRIVDVIGLDKENKAFNASLGTYHDLEKILDKDFLDNPDNESILEDIVQTLTLFEDREMIKKRLENYKDLFTESQLKKLYRRHYTGWGRLSAKLINGIRDKESQKTILDYLIDDGRSNRNFMQLINDDGLSFKSIISKAQAGSHSDNLKEVVGELAGSPAIKKGILQSLKIVDELVKVMGYEPEQIVVEMARENQTTNQGRRNSRQRYKLLDDGVKNLASDLNGNILKEYPTDNQALQNERLFLYYLQNGRDMYTGEALDIDNLSQYDIDHIIPQAFIKDDSIDNRVLVSSAKNRGKSDDVPSLEIVKDCKVFWKKLLDAKLMSQRKYDNLTKAERGGLTSDDKARFIQRQLVETRQITKHVARILDERFNNELDSKGRRIRKVKIVTLKSNLVSNFRKEFGFYKIREVNNYHHAHDAYLNAVVAKAILTKYPQLEPEFVYGDYPKYNSYKTRKSATEKLFFYSNIMNFFKTKVTLADGTVVVKDDIEVNNDTGEIVWDKKKHFATVRKVLSYPQNNIVKKTEIQTGGFSKESILAHGNSDKLIPRKTKDIYLDPKKYGGFDSPIVAYSVLVVADIKKGKAQKLKTVTELLGITIMERSRFEKNPSAFLESKGYLNIRADKLIILPKYSLFELENGRRRLLASAGELQKGNELALPTQFMKFLYLASRYNESKGKPEEIEKKQEFVNQHVSYFDDILQLINDFSKRVILADANLEKINKLYQDNKENISVDELANNIINLFTFTSLGAPAAFKFFDKIVDRKRYTSTKEVLNSTLIHQSITGLYETRIDLGKLGGD

SEQ ID NO: 52 - protein, 1370 aa, Streptococcus agalactiae
MNKPYSIGLDIGTNSVGWSIITDDYKVPAKKMRVLGNTDKEYIKKNLIGALLFDGGNTAADRRLKRTARRRYTRRRNRILYLQEIFAEEMSKVDDSFFHRLEDSFLVEEDKRGSKYPIFATLQEEKDYHEKFSTIYHLRKELADKKEKADLRLIYIALAHIIKFRGHFLIEDDSFDVRNTDISKQYQDFLEIFNTTFENNDLLSQNVDVEAILTDKISKSAKKDRILAQYPNQKSTGIFAEFLKLIVGNQADFKKYFNLEDKTPLQFAKDSYDEDLENLLGQIGDEFADLFSAAKKLYDSVLLSGILTVIDLSTKAPLSASMIQRYDEHREDLKQLKQFVKASLPEKYQEIFADSSKDGYAGYIEGKTNQEAFYKYLSKLLTKQEDSENFLEKIKNEDFLRKQRTFDNGSIPHQVHLTELKAIIRRQSEYYPFLKENQDRIEKILTFRIPYYIGPLAREKSDFAWMTRKTDDSIRPWNFEDLVDKEKSAEAFIHRMTNNDFYLPEEKVLPKHSLIYEKFTVYNELTKVRYKNEQGETYFFDSNIKQEIFDGVFKEHRKVSKKKLLDFLAKEYEEFRIVDVIGLDKENKAFNASLGTYHDLEKILDKDFLDNPDNESILEDIVQTLTLFEDREMIKKRLENYKDLFTESQLKKLYRRHYTGWGRLSAKLINGIRDKESQKTILDYLIDDGRSNRNFMQLINDDGLSFKSIISKAQAGSHSDNLKEVVGELAGSPAIKKGILQSLKIVDELVKVMGYEPEQIVVEMARENQTTNQGRRNSRQRYKLLDDGVKNLASDLNGNILKEYPTDNQALQNERLFLYYLQNGRDMYTGEALDIDNLSQYDIDHIIPQAFIKDDSIDNRVLVSSAKNRGKSDDVPSLEIVKDCKVFWKKLLDAKLMSQRKYDNLTKAERGGLTSDDKARFIQRQLVETRQITKHVARILDERFNNELDSKGRRIRKVKIVTLKSNLVSNFRKEFGFYKIREVNNYHHAHDAYLNAVVAKAILTKYPQLEPEFVYGDYPKYNSYKTRKSATEKLFFYSNIMNFFKTKVTLADGTVVVKDDIEVNNDTGEIVWDKKKHFATVRKVLSYPQNNIVKKTEIQTGGFSKESILAHGNSDKLIPRKTKDIYLDPKKYGGFDSPIVAYSVLVVADIKKGKAQKLKTVTELLGITIMERSRFEKNPSAFLESKGYLNIRDDKLMILPKYSLFELENGRRRLLASAGELQKGNELALPTQFMKFLYLASRYNESKGKPEEIEKKQEFVNQHVSYFDDILQLINDFSKRVILADANLEKINKLYQDNKENISVDELANNIINLFTFTSLGAPAAFKFFDKIVDRKRYTSTKEVLNSTLIHQSITGLYETRIDLGKLGED

SEQ ID NO: 53 - protein, 1370 aa, Streptococcus agalactiae
MNKPYSIGLDIGTNSVGWSIITDDYKVPAKKMRVLGNTDKEYIKKNLIGALLFDGGNTAADRRLKRTARRRYTRRRNRILYLQEIFAEEMSKVDDSFFHRLEDSFLVEEDKRGSKYPIFATLQEEKDYHEKFSTIYHLRKELADKKEKADLRLIYIALAHIIKFRGHFLIEDDSFDVRNTDISKQYQDFLEIFNTTFENNDLLSQNVDVEAILTDKISKSAKKDRILAQYPNQKSTGIFAEFLKLIVGNQADFKKYFNLEDKTPLQFAKDSYDEDLENLLGQIGDEFADLFSAAKKLYDSVLLSGILTVIDLSTKAPLSASMIQRYDEHREDLKQLKQFVKASLPEKYQEIFADSSKDGYAGYIEGKTNQEAFYKYLSKLLTKQEDSENFLEKIKNEDFLRKQRTFDNGSIPHQVHLTELKAIIRRQSEYYPFLKENQDRIEKILTFRIPYYIGPLAREKSDFAWMTRKTDDSIRPWNFEDLVDKEKSAEAFIHRMTNNDFYLPEEKVLPKHSLIYEKFTVYNELTKVRYKNEQGETYFFDSNIKQEIFDGVFKEHRKVSKKKLLDFLAKEYEEFRIVDVIGLDKENKAFNASLGTYHDLEKILDKDFLDNPDNESILEDIVQTLTLFEDREMIKKRLENYKDLFTESQLKKLYRRHYTGWGRLSAKLINGIRDKESQKTILDYLIDDGRSNRNFMQLINDDGLSFKSIISKAQAGSHSDNLKEVVGELAGSPAIKKGILQSLKIVDELVKVVGYEPEQIVVEMARENQTTNQGRRNSRQRYKLLDDGVKNLASDLNGNILKEYPTDNQALQNERLFLYYLQNGRDMYTGEALDIDNLSQYDIDHIIPQAFIKDDSIDNRVLVSSAKNRGKSDDVPSLEIVKDCKVFWKKLLDAKLMSQRKYDNLTKAERGGLTSDDKARFIQRQLVETRQITKHVARILDERFNNELDSKGRRIRKVKIVTLKSNLVSNFRKEFGFYKIREVNNYHHAHDAYLNAVVAKAILTKYPQLEPEFVYGDYPKYNSYKTRKSATEKLFFYSNIMNFFKTKVTLADGTVVVKDDIEVNNDTGEIVWDKKKHFATVRKVLSYPQNNIVKKTEIQTGGFSKESILAHGNSDKLIPRKTKDIYLDPKKYGGFDSPIVAYSVLVVADIKKGKAQKLKTVTELLGITIMERSRFEKNPSAFLESKGYLNIRADKLIILPKYSLFELENGRRRLLASAGELQKGNELALPTQFMKFLYLASRYNESKGKPEEIEKKQEFVNQHVSYFDDILQLINDFSKRVILADANLEKINKLYQDNKENISVDELANNIINLFTFTSLGAPAAFKFFDKIVDRKRYTSTKEVLNSTLIHQSITGLYETRIDLGKLGED

SEQ ID NO: 54 - protein, 1370 aa, Streptococcus agalactiae
MNKPYSIGLDIGTNSVGWSIITDDYKVPAKKMRVLGNTDKEYIKKNLIGALLFDGGNTAADRRLKRTARRRYTRRRNRILYLQEIFAEEMSKVDDSFFHRLEDSFLVEEDKRGSKYPIFATLQEEKDYHEKFSTIYHLRKELADKKEKADLRLIYIALAHIIKFRGHFLIEDDSFDVRNTDISKQYQDFLEIFNTTFENNDLLSQNVDVEAILTDKISKSAKKDRILAQYPNQKSTGIFAEFLKLIVGNQADFKKYFNLEDKTPLQFAKDSYDEDLENLLRQIGDEFADLFSAAKKLYDSVLLSGILTVIDLSTKAPLSASMIQRYDEHREDLKQLKQFVKASLPEKYQEIFADSSKDGYAGYIEGKTNQEAFYKYLSKLLTKQEDSENFLEKIKNEDFLRKQRTFDNGSIPHQVHLTELKAIIRRQSEYYPFLKENQDRIEKILTFRIPYYIGPLAREKSDFAWMTRKTDDSIRPWNFEDLVDKEKSAEAFIHRMTNNDFYLPEEKVLPKHSLIYEKFTVYNELTKVRYKNEQGETYFFDSNIKQEIFDGVFKEHRKVSKKKLLDFLAKEYEEFRIVDVIGLDKENKAFNASLGTYHDLEKILDKDFLDNPDNESILEDIVQTLTLFEDREMIKKRLENYKDLFTESQLKKLYRRHYTGWGRLSAKLINGIRDKESQKTILDYLIDDGRSNRNFMQLINDDGLSFKSIISKAQAGSHSDNLKEVVGELAGSPAIKKGILQSLKIVDELVKVMGYEPEQIVVEMARENQTTNQGRRNSRQRYKLLDDGVKNLASDLNGNILKEYPTDNQALQNERLFLYYLQNGRDMYTGEALDIDNLSQYDIDHIIPQAFIKDDSIDNRVLVSSAKNRGKSDDVPSLEIVKDCKVFWKKLLDAKLMSQRKYDNLTKAERGGLTSDDKARFIQRQLVETRQITKHVARILDERFNNELDSKGRRIRKVKIVTLKSNLVSNFRKEFGFYKIREVNNYHHAHDAYLNAVVAKAILTKYPQLEPEFVYGDYPKYNSYKTRKSATEKLFFYSNIMNFFKTKVTLADGTVVVKDDIEVNNDTGEIVWDKKKHFATVRKVLSYPQNNIVKKTEIQTGGFSKESILAHGNSDKLIPRKTKDIYLDPKKYGGFDSPIVAYSVLVVADIKKGKAQKLKTVTELLGITIMERSRFEKNPSAFLESKGYLNIRADKLIILPKYSLFELENGRRRLLASAGELQKGNELALPTQFMKFLYLASRYNESKGKPEEIEKKQEFVNQHVSYFDDILQLINDFSKRVILADANLEKINKLYQDNKENISVDELANNIINLFTFTSLGAPAAFKFFDKIVDRKRYTSTKEVLNSTLIHQSITGLYETRIDLGKLGED

SEQ ID NO: 55 - protein, 1370 aa, Streptococcus agalactiae
MNKPYSIGLDIGTNSVGWSIITDDYKVPAKKMRVLGNTDKEYIKKNLIGALLFDGGNTAADRRLKRTARRRYTRRRNRILYLQEIFAEEMSKVDDSFFHRLEDSFLVEEDKRGSKYPIFATMQEEKDYHEKFPTIYHLRKELADKKEKADLRLVYLALAHIIKFRGHFLIEDDRFDVRNTDIQKQYQAFLEIFDTSFENNHLLSQNVDVEAILTDKISKSAKKDRILAQYPNQKSTGIFAEFLKLIVGNQADFKKHFNLEDKTPLQFAKDSYDEDLENLLGQIGDEFADLFSAAKKLYDSVLLSGILTVTDLSTKAPLSAYMIQRYDEHREDLKQLKQFVKASLPEKYQEIFADSSKDGYAGYIEGKTNQEAFYKYLSKLLTKQEDSEYFLEKIKNEDFLRKQRTFDNGSIPHQVHLTELKAIIRRQSEYYPFLKENQDKIEKILTFRIPYYVGPLARGNSDFAWMTRKTDDSIRPWNFEDLVDKEKSAEAFIHRMTNNDLYLPEEKVLPKHSLIYEKFTVYNELTKVRYKNEQGETYFFDSNVKQEIFDGVFKEHRKVSKKQLLDFLAKEFEEFRIVDVTGLDKENKAFNASLGTYHDLKKILDKDFLDNPDNESILEDIVQTITLFEDREMIKKRLENYKDLFTESQLKKLYRRHYTGWGRLSAKLINGIRDRESQKTILDYLISDGRANRNFMQLINDDGLSFKSIISKAQSGSHSDNLKEVVGELAGSPAIKKGILQSLKIVDELVKVMGYEPEQIVVEMARENQTTNQGRRNSRQRYKLLEDGVKNLASDLNGDILKEYPTDNQALQNERLFLYYLQNGRDMYTGEALDIDNLSQYDIDHIVPQAFIKDDSIDNRVLVSSAKNRGKSDDVPSIDIVKARKAFWKKLLDAKLISQRKYDNLTKAERGGLTPDDKAGFIQRQLVETRQITKHVARILDERFNNKVDDNNKPIRKVKIVTLKSNLVSNFRKEFGFYKIREVNNYHHAHDAYLNAVVAKAILTKYPQLEPEFVYGDYPKYNSYKTRKSATEKLFFYSNIMNFFKTKVTLADETVVVKDDIEVNNETGEIAWDKKKHFATVRKVLSYPQVNIVKKTEVQTGGFSKESILAHSNSDKLIPRKTKDIYLDPKKYGGFDSPIVAYSVLVLADIKKGKAQKLKTVKELIGITIMERERFEKNPSAFLESKGYLNIRTDKLIILPKYSLFELENGRRRLLASAGELQKGNELALPTQYMKFLYLASRYNESKGKPEEIEKKQEFVNQHISYFDDILQLINDFSKRVILADANLEKINKLYSDNKDNTPVDELAKNIINLFTFTSLGAPAAFKFFDKSVDRKRYTSTKEVLDSTLIHQSITGLYETRIDLGKLGED

SEQ ID NO: 56 - protein, 1370 aa, Streptococcus agalactiae
MNKPYSIGLDIGTNSVGWSIITDDYKVPAKKMRVLGNTDKEYIKKNLIGALLFDGGNTAADRRLKRTARRRYTRRRNRILYLQEIFAEEMSKVDDSFFHRLEDSFLVEEDKRGSKYPIFATMQEEKYYHEKFPTIYHLRKELADKKEKADLRLIYLALAHIIKFRGHFLIEDDRFDVRNTDIQKQYQAFLEIFDTTFENNDLLSQNVDVEAILTDKISKSAKKDRILARYPNQKSTGIFAEFLKLIVGNQADFKKHFNLEDKTPLQFAKDSYDEDLENLLGQIGDEFADLFSAAKKLYDSVLLSGILTVTDLSTKAPLSASMIQHYDEHREDLKQLKQFVKASLPEKYQEIFADSSKDGYAGYIEGKTNQEAFYKYLSKLLTKQEGSEYLLEKIKNEDFLRKQRTFDNGSIPHQVHLTELRAIIRRQSEYYPFLKENLDRIEKILTFRIPYYVGPLAREKSDFAWMTRKTDDSIRPWNFEDLVDKEKSAEAFIHRMTNNDLYLPEEKVLPKHSLIYEKFTVYNELTKVRFLAEGFKDFQFLNRKQKETIFNSLFKEKRKVTEKDIISFLNKVDGYEGIAIKGIEKQFNASLSTYHDLKKILGKDFLDNTDNELILEDIVQTLTLFEDREMIRKRLDIYKDFFTESQLKKLYRRHYTGWGRLSAKLINGIRNKENQKTILDYLIDDGSANRNFMQLIKDAGLSFKPIIDKARTGSHSDNLKEVVGELAGSPAIKKGILQSLKIVDELVKVMGYEPEQIVVEMARENQTTAKGLSRSRQRLTTLRESLANLKSNILEEKKPKYVKDQVENHHLSDDRLFLYYLQNGKDMYTDDELDIDNLSQYDIDHIIPQAFIKDDSIDNRVLVSSAKNRGKSDDVPSVEIVKDCKVFWKKLLDAKLMSQRKYDNLTKAERGGLTSDDKARFIQRQLVETRQITKHVARILDERFNNELDSKGRRIRKVKIVTLKSNLVSNFRKEFGFYKIREVNNYHHAHDAYLNAVVAKAILTKYPQLEPEFVYGDYPKYNSYKTRKSATEKLFFYSNIMNFFKTKVTLADGTVVVKDDIEVNNDTGEIVWDKKKHFATVRKVLSYPQVNIVKKTEIQTGGFSKESILAHGNSDKLIPRKTKDIYLDPKKYGGFDSPIVAYSVLVVADIKKGKAQKLKTVTELLGITIMERSRFEKNPSAFLESKGYLNIRDDKLMILPKYSLFELENGRRRLLASAGELQKGNELALPTQFMKFLYLASRYNELKGKPEEIEQKQEFVVQHVSYFDDILQIINDFSNRVILADANLEKINKLYQDNKENIPVDELANNIINLFTFTSLGAPAAFKFFDKIVDRKRYTSTKEVLNSTLIHQSITGLYETRIDLGKLGED

SEQ ID NO: 57 - protein, 1370 aa, Streptococcus agalactiae
MNKPYSIGLDIGTNSVGWSIITDDYKVPAKKMRVLGNTDKEYIKKNLIGALLFDGGNTAADRRLKRTARRRYTRRRNRILYLQEIFAEEMSKVDDSFFHRLEDSFLVEEDKRGSKYPIFATMQEEKYYHEKFPTIYHLRKELADKKEKADLRLIYLALAHIIKFRGHFLIEDDRFDVRNTDIQKQYQAFLEIFDTTFENNDLLSQNVDVEAILTDKISKSAKKDRILARYPNQKSTGIFAEFLKLIVGNQADFKKHFNLEDKTPLQFAKDSYDEDLENLLGQIGDEFADLFSAAKKLYDSVLLSGILTVTDLSTKAPLSASMIQRYDEHREDLKQLKQFVKASLPEKYQEIFADSSKDGYAGYIEGKTNQEAFYKYLSKLLTKQEGSEYLLEKIKNEDFLRKQRTFDNGSIPHQVHLTELRAIIRRQSEYYPFLKENLDRIEKILTFRIPYYVGPLAREKSDFAWMTRKTDDSIRPWNFEDLVDKEKSAEAFIHRMTNNDLYLPEEKVLPKHSLIYEKFTVYNELTKVRFLAEGFKDFQFLNRKQKETIFNSLFKEKRKVTEKDIISFLNKVDGYEGIAIKGIEKQFNASLSTYHDLKKILGKDFLDNTDNELILEDIVQTLTLFEDREMIRKRLDIYKDFFTESQLKKLYRRHYTGWERLSAKLINGIRNKENQKTILDYLIDDGSANRNFMQLIKDAGLSFKPIIDKARTGSHLDNLKEVVGELAGSPAIKKGILQSLKIVDELVKVMGYEPEQIVVEMARENQTTAKGLSRSRQRLTTLRESLANLKSNILEEKKPKYVKDQVENHHLSDDRLFLYYLQNGKDMYTDDELDIDNLSQYDIDHIIPQAFIKDDSIDNRVLVSSAKNRGKSDDVPSLEIVKDCKVFWKKLLDAKLMSQRKYDNLTKAERGGLTSDDKARFIQRQLVETRQITKHVARILDERFNNELDSKGRRIRKVKIVTLKSNLVSNFRKEFGFYKIREVNNYHHAHDAYLNAVVAKAILTKYPQLEPEFVYGDYPKYNSYKTRKSATEKLFFYSNIMNFFKTKVTLADGTVVVKDDIEVNNDTGEIVWDKKKHFATVRKVLSYPQVNIVKKTEVQTGGFSKESILAHGNSDKLIPRKTKDIYLDPKKYGGFDSPIVAYSVLVVADIKKGKAQKLKTVTELLGITIMERSRFEKNPSAFLESKGYLNIRTDKLIILPKYSLFELENGRRRLLASAGELQKGNELALPTQYMKFLYLASRYNELKGKPEEIEQKQEFVVQHVSYFDDILQIINDFSNRVILADANLEKINKLYQDNKENIPVDELANNIINLFTFTSLGAPAAFKFFDKIVDRKRYTSTKEVLNSTLIHQSITGLYETRIDLGKLGEG

SEQ ID NO: 58 - protein, 1370 aa, Streptococcus agalactiae
MNKPYSIGLDIGTNSVGWSIITDDYKVPAKKMRVLGNTDKEYIKKNLIGALLFDGGNTAADRRLKRTARRRYTRRRNRILYLQEIFAEEMSKVDDSFFHRLEDSFLVEEDKRGSKYPIFATMQEEKYYHEKFPTIYHLRKELADKKEKADLRLIYLALAHIIKFRGHFLIEDDRFDVRNTDIQKQYQAFLEIFDTTFENNDLLSQNVDVEAILTDKISKSAKKDRILARYPNQKSTGIFAEFLKLIVGNQADFKKHFNLEDKTPLQFAKDSYDEDLENLLGQIGDEFADLFSAAKKLYDSVLLSGILTVTDLSTKAPLSASMIQRYDEHREDLKQLKQFVKASLPEKYQEIFADSSKDGYAGYIEGKTNQEAFYKYLSKLLTKQEGSEYLLEKIKNEDFLRKQRTFDNGSIPHQVHLTELRAIIRRQSEYYPFLKENLDRIEKILTFRIPYYVGPLAREKSDFAWMTRKTDDSIRPWNFEDLVDKEKSAEAFIHRMTNNDLYLPEEKVLPKHSLIYEKFTVYNELTKVRFLAEGFKDFQFLNRKQKETIFNSLFKEKRKVTEKDIISFLNKVDGYEGIAIKGIEKQFNASLSTYHDLKKILGKDFLDNTDNELILEDIVQTLTLFEDREMIRKRLDIYKDFFTESQLKKLYRRHYTGWGRLSAKLINGIRNKENQKTILDYLIDDGSANRNFMQLIKDAGLSFKPIIDKARTGSHLDNLKEVVGELAGSPAIKKGILQSLKIVDELVKVMGYEPEQIVVEMARENQTTAKGLSRSRQRLTTLRESLANLKSNILEEKKPKYVKDQVENHHLSDDRLFLYYLQNGKDMYTDDELDIDNLSQYDIDHIIPQAFIKDDSIDNRVLVSSAKNRGKSDDVPSLEIVKDCKVFWKKLLDAKLMSQRKYDNLTKAERGGLTSDDKARFIQRQLVETRQITKHVARILDERFNNELDSKGRRIRKVKIVTLKSNLVSNFRKEFGFYKIREVNNYHHAHDAYLNAVVAKAILTKYPQLEPEFVYGDYPKYNSYKTRKSATEKLFFYSNIMNFFKTKVTLADGTVVVKDDIEVNNDTGEIVWDKKKHFATVRKVLSYPQVNIVKKTEVQTGGFSKESILAHGNSDKLIPRKTKDIYLDPKKYGGFDSPIVAYSVLVVADIKKGKAQKLKTVTELLGITIMERSRFEKNPSAFLESKGYLNIRTDKLIILPKYSLFELENGRRRLLASAGELQKGNELALPTQYMKFLYLASRYNELKGKPEEIEQKQEFVVQHVSYFDDILQIINDFSNRVILADANLEKINKLYQDNKENIPVDELANNIINLFTFTSLGAPAAFKFFDKIVDRKRYTSTKEVLNSTLIHQSITGLYETRIDLGKLGEG

SEQ ID NO: 59 - protein, 1370 aa, Streptococcus agalactiae
MNKPYSIGLDIGTNSVGWSIITDDYKVPAKKMRVLGNTDKEYIKKNLIGALLFDGGNTAADRRLKRTARRRYTRRRNRILYLQEIFAEEMSKVDDSFFHRLEDSFLVEEDKRGSKYPIFATMQEEKYYHEKFPTIYHLRKELADKKEKADLRLIYLALAHIIKFRGHFLIEDDRFDVRNTDIQKQYQAFLEIFDTTFENNDLLSQNVDVEAILTDKISKSAKKDRILARYPNQKSTGIFAEFLKLIVGNQADFKKHFNLEDKTPLQFAKDSYDEDLENLLGQIGDEFADLFSAAKKLYDSVLLSGILTVTDLSTKAPLSASMIQRYDEHREDLKQLKQFVKASLPEKYQEIFADSSKDGYAGYIEGKTNQEAFYKYLSKLLTKQEGSEYLLEKIKNEDFLRKQRTFDNGSIPHQVHLTELRAIIRRQSEYYPFLKENLDRIEKILTFRIPYYVGPLAREKSDFAWMTRKTDDSIRPWNFEDLVDKEKSAEAFIHRMTNNDLYLPEEKVLPKHSLIYEKFTVYNELTKVRFLAEGFKDFQFLNRKQKETIFNSLFKEKRKVTEKDIISFLNKVDGYEGIAIKGIEKQFNASLSTYHDLKKILGKDFLDNTDNELILEDIVQTLTLFEDREMIRKRLDIYKDFFTESQLKKLYRRHYTGWGRLSAKLINGIRNKENQKTILDYLIDDGSANRNFMQLIKDAGLSFKPIIDKARTGSHSDNLKEVVGELAGSPAIKKGILQSLKIVDELVKVMGYEPEQIVVEMARENQTTAKGLSRLRQRLTTLRESLANLKSNILEEKKPKYVKDQVENHHLSDDRLFLYYLQNGKDMYTDDELDIDNLSQYDIDHIIPQAFIKDDSIDNRVLVSSAKNRGKSDDVPSVEIVKDCKVFWKKLLDAKLMSQRKYDNLTKAERGGLTSDDKARFIQRQLVETRQITKHVARILDERFNNELDSKGRRIRKVKIVTLKSNLVSNFRKEFGFYKIREVNNYHHAHDAYLNAVVAKAILTKYPQLEPEFVYGDYPKYNSYKTRKSATEKLFFYSNIMNFFKTKVTLADGTVVVKDDIEVNNDTGEIVWDKKKHFATVRKVLSYPQVNIVKKTEIQTGGFSKESILAHGNSDKLIPRKTKDIYLDPKKYGGFDSPIVAYSVLVVADIKKGKAQKLKTVTELLGITIMERSRFEKNPSAFLESKGYLNIRDDKLMILPKYSLFELENGRRRLLASADELQKGNELALPTQFMKFLYLASRYNELKGKPEEIEQKQEFVVQHVSYFDDILQIINDFSNRVILADANLEKINKLYQDNKENIPVDELANNIINLFTFTSLGAPAAFKFFDKIVDRKRYTSTKEVLNSTLIHQSITGLYETRIDLGKLGED

SEQ ID NO: 60 - protein, 1370 aa, Streptococcus agalactiae
MNKPYSIGLDIGTNSVGWSIITDDYKVPAKKMRVLGNTDKEYIKKNLIGALLFDGGNTAADRRLKRTARRRYTRRRNRILYLQEIFAEEMSKVDDSFFHRLEDSFLVEEDKRGSKYPIFATMQEEKYYHEKFPTIYHLRKELADKKEKADLRLIYLALAHIIKFRGHFLIEDDRFDVRNTDIQKQYQAFLEIFDTTFENNDLLSQNVDVEAILTDKISKSAKKDRILARYPNQKSTGIFAEFLKLIVGNQADFKKHFNLEDKTPLQFAKDSYDEDLENLLGQIGDEFADLFSAAKKLYDSVLLSGILTVTDLSTKAPLSASMIQRYDEHREDLKQLKQFVKASLPEKYQEIFADSSKDGYAGYIEGKTNQEAFYKYLSKLLTKQEGSEYLLEKIKNEDFLRKQRTFDNGSIPHQVHLTELRAIIRRQSEYYPFLKENLDRIEKILTFRIPYYVGPLAREKSDFAWMTRKTDDSIRPWNFEDLVDKEKSAEAFIHRMTNNDLYLPEEKVLPKHSLIYEKFTVYNELTKVRFLAEGFKDFQFLNRKQKETIFNSLFKEKRKVTEKDIISFLNKVDGYEGIAIKGIEKQFNASLSTYHDLKKILGKDFLDNTDNELILEDIVQTLTLFEDREMIRKRLDIYKDFFTESQLKKLYRRHYTGWGRLSAKLINGIRNKENQKTILDYLIDDGSANRNFMQLIKDAGLSFKPIIDKARTGSHSDNLKEVVGELAGSPAIKKGILQSLKIVDELVKVMGYEPEQIVVEMARENQTTAKGLSRSRQRLTTLRESLANLKSNILEEKKPKYVKDQVENHHLSDDRLFLYYLQNGKDMYTDDELDIDNLSQYDIDHIIPQAFIKDDSIDNRVLVSSAKNRGKSDDVPSVEIVKDCKVFWKKLLDAKLMSQRKYDNLTKAERGGLTSDDKARFIQRQLVETRQITKHVARILDERFNNELDSKGRRIRKVKIVTLKSNLVSNFRKEFGFYKIREVNNYHHAHDAYLNAVVAKAILTKYPQLEPEFVYGDYPKYNSYKTRKSATEKLFFYSNIMNFFKTKVTLADGTVVVKDDIEVNNDTGEIVWDKKKHFATVRKVLSYPQVNIVKKTEIQTGGFSKESILAHGNSDKLIPRKTKDIYLDPKKYGGFDSPIVAYSVLVVADIKKGKAQKLKTVTELLGITIMERSRFEKNPSAFLESKGYLNIRDDKLMILPKYSLFELENGRRRLLASAGELQKGNELALPTQFMKFLYLASRYNELKGKPEEIEQKQEFVVQHVSYFDDILQIINDFSNRVILADANLEKINKLYQDNKENIPVDELANNIINLFTFTSLGAPAAFKFFDKIVDRKRYTSTKEVLNSTLIHQSITGLYETRIDLGKLGED

SEQ ID NO: 61 - protein, 1370 aa, Streptococcus agalactiae
MNKPYSIGLDIGTNSVGWSIITDDYKVPAKKMRVLGNTDKEYIKKNLIGALLFDGGNTAADRRLKRTARRRYTRRRNRILYLQEIFAEEMSKVDDSFFHRLEDSFLVEEDKRGSKYPIFATMQEEKYYHEKFPTIYHLRKELADKKEKADLRLIYLALAHIIKFRGHFLIEDDRFDVRNTDIQKQYQAFLEIFDTTFENNDLLSQNVDVEAILTDKISKSAKKDRILARYPNQKSTGIFAEFLKLIVGNQADFKKHFNLEDKTPLQFAKDSYDEDLENLLGQIGDEFADLFSAAKKLYDSVLLSGILTVTDLSTKAPLSASMIQRYDEHREDLKQLKQFVKASLPEKYQEIFADSSKDGYAGYIEGKTNQEAFYKYLSKLLTKQEGSEYLLEKIKNEDFLRKQRTFDNGSIPHQVHLTELRAIIRRQSEYYPFLKENLDRIEKILTFRIPYYVGPLAREKSDFAWMTRKTDDSIRPWNFEDLVDKEKSAEAFIHRMTNNDLYLPEEKVLPKHSLIYEKFTVYNELTKVRFLAEGFKDFQFLNRKQKETIFNSLFKEKRKVTEKDIISFLNKVDGYEGIAIKGIEKQFNASLSTYHDLKKILGKDFLDNTDNELILEDIVQTLTLFEDREMIRKRLDIYKDFFTESQLKKLYRRHYTGWGRLSAKLINGIRNKENQKTILDYLIDDGSANRNFMQLIKDAGLSFKPIIDKARTGSHSDNLKEVVGELAGSPAIKKGILQSLKIVDELVKVMGYEPEQIVVEMARENQTTAKGLSRSRQRLTTLRESLANLKSNILEEKKPKYVKDQVENHHLSDDRLFLYYLQNGKDMYTDDELDIDNLSQYDIDHIIPQAFIKDDSIDNRVLVSSAKNRGKSDDVPSVEIVKDCKVFWKKLLDAKLMSQRKYDNLTKAERGGLTSDDKARFIQRQLVETRQITKHVARILDERFNNELDSKGRRIRKVKIVTLKSNLVSNFRKEFGFYKIREVNNYHHAHDAYLNAVVAKAILTKYPQLEPEFVYGDYPKYNSYKTRKSATEKLFFYSNIMNFFKTKVTLADGTVVVKDDIEVNNDTGEIVWDKKKHFATVRKVLSYPQVNIVKKTEIQTGGFSKESILAHGNSDKLIPRKTKDIYLDPKKYGGFDSPKVAYSVLVVADIKKGKAQKLKTVTELLGITIMERSRFEKNPSAFLESKGYLNIRDDKLMILPKYSLFELENGRRRLLASAGELQKGNELALPTQFMKFLYLASRYNELKGKPEEIEQKQEFVVQHVSYFDDILQIINDFSNRVILADANLEKINKLYQDNKENIPVDELANNIINLFTFTSLGAPAAFKFFDKIVDRKRYTSTKEVLNSTLIHKSITGLYETRIDLGKLGED

SEQ ID NO: 62 - protein, 1370 aa, Streptococcus agalactiae
MNKPYSIGLDIGTNSVGWSIITDDYKVPAKKMRVLGNTDKEYIKKNLIGALLFDGGNTAADRRLKRTARRRYTRRRNRILYLQEIFAEEMSKVDDSFFHRLEDSFLVEEDKRGSKYPIFATMQEEKYYHEKFPTIYHLRKELADKKEKADLRLIYLALAHIIKFRGHFLIEDDRFDVRNTDIQKQYQAFLEIFDTTFENNDLLSQNVDVEAILTDKISKSAKKDRILARYPNQKSTGIFAEFLKLIVGNQADFKKHFNLEDKTPLQFAKDSYDEDLENLLGQIGDEFADLFSAAKKLYDSVLLSGILTVTDLSTKAPLSASMIQRYDEHREDLKQLKQFVKASLPEKYQEIFADSSKDGYAGYIEGKTNQEAFYKYLSKLLTKQEGSEYLLEKIKNEDFLRKQRTFDNGSIPHQVHLTELRAIIRRQSEYYPLLKENLDRIEKILTFRIPYYVGPLAREKSDFAWMTRKTDDSIRPWNFEDLVDKEKSAEAFIHRMTNNDLYLPEEKVLPKHSLIYEKFTVYNELTKVRFLAEGFKDFQFLNRKQKETIFNSLFKEKRKVTEKDIISFLNKVDGYEGIAIKGIEKQFNASLSTYHDLKKILGKDFLDNTDNELILEDIVQTLTLFEDREMIRKRLDIYKDFFTESQLKKLYRRHYTGWGRLSAKLINGIRNKENQKTILDYLIDDGSANRNFMQLIKDAGLSFKPIIDKARTGSHSDNLKEVVGELAGSPAIKKGILQSLKIVDELVKVMGYEPEQIVVEMARENQTTAKGLSRSRQRLTTLRESLANLKSNILEEKKPKYVKDQVENHHLSDDRLFLYYLQNGKDMYTDDELDIDNLSQYDIDHIIPQAFIKDDSIDNRVLVSSAKNRGKSDDVPSVEIVKDCKVFWKKLLDAKLMSQRKYDNLTKAERGGLTSDDKARFIQRQLVETRQITKHVARILDERFNNELDSKGRRIRKVKIVTLKSNLVSNFRKEFGFYKIREVNNYHHAHDAYLNAVVAKAILTKYPQLEPEFVYGDYPKYNSYKTRKSATEKLFFYSNIMNFFKTKVTLADGTVVVKDDIEVNNDTGEIVWDKKKHFATVRKVLSYPQVNIVKKTEIQTGGFSKESILAHGNSDKLIPRKTKDIYLDPKKYGGFDSPIVAYSVLVVADIKKGKAQKLKTVTELLGITIMERSRFEKNPSAFLESKGYLDIRDDKLMILPKYSLFELENGRRRLLASAGELQKGNELALPTQFMKFLYLASRYNELKGKPEEIEQKQEFVVQHVSYFDDILQIINDFSNRVILADANLEKINKLYQDNKENIPVDELANNIINLFTFTSLGAPAAFKFFDKIVDRKRYTSTKEVLNSTLIHQSITGLYETRIDLGKLGED

SEQ ID NO: 63 - protein, 1370 aa, Streptococcus agalactiae
  misc_feature (117)..(117): Xaa can be any naturally occurring amino acid
MNKPYSIGLDIGTNSVGWSIITDDYKVPAKKMRVLGNTDKEYIKKNLIGALLFDGGNTAADRRLKRTARRRYTRRRNRILYLQEIFAEEMSKVDDSFFHRLEDSFLVEEDKRGSKYXIFATLQEEKDYHEKFSTIYHLRKELADKKEKADLRLIYIALAHIIKFRGHFLIEDDSFDVRNTDISKQYQDFLEIFNTTFENNDLLSQNVDVEAILTDKISKSAKKDRILAQYPNQKSTGIFAEFLKLIVGNQADFKKYFNLEDKTPLQFAKDSYDEDLENLLGQIGDEFADLFSAAKKLYDSVLLSGILTVIDLSTKAPLSASMIQRYDEHREDLKQLKQFVKASLPEKYQEIFADSSKDGYAGYIEGKTNQEAFYKYLSKLLTKQEDSENFLEKIKNEDFLRKQRTFDNGSIPHQVHLTELKAIIRRQSEYYPFLKENQDRIEKILTFRIPYYIGPLAREKSDFAWMTRKTDDSIRPWNFEDLVDKEKSAEAFIHRMTNNDFYLPEEKVLPKHSLIYEKFTVYNELTKVRYKNEQGETYFFDSNIKQEIFDGVFKEHRKVSKKKLLDFLAKEYEEFRIVDVIGLDKENKAFNASLGTYHDLEKILDKDFLDNPDNESILEDIVQTLTLFEDREMIKKRLENYKDLFTESQLKKLYRRHYTGWGRLSAKLINGIRDKESQKTILDYLIDDGRSNRNFMQLINDDGLSFKSIISKAQAGSHSDNLKEVVGELAGSPAIKKGILQSLKIVDELVKVMGYEPEQIVVEMARENQTTNQGRRNSRQRYKLLDDGVKNLASDLNGNILKEYPTDNQALQNERLFLYYLQNGRDMYTGEALDIDNLSQYDIDHIIPQAFIKDDSIDNRVLVSSAKNRGKSDDVPSLEIVKDCKVFWKKLLDAKLMSQRKYDNLTKAERGGLTSDDKARFIQRQLVETRQITKHVARILDERFNNELDSKGRRIRKVKIVTLKSNLVSNFRKEFGFYKIREVNNYHHAHDAYLNAVVAKAILTKYPQLEPEFVYGDYPKYNSYKTRKSATEKLFFYSNIMNFFKTKVTLADGTVVVKDDIEVNNDTGEIVWDKKKHFATVRKVLSYPQNNIVKKTEIQTGGFSKESILAHGNSDKLIPRKTKDIYLDPKKYGGFDSPIVAYSVLVVADIKKGKAQKLKTVTELLGITIMERSRFEKNPSAFLESKGYLNIRADKLIILPKYSLFELENGRRRLLASAGELQKGNELALPTQFMKFLYLASRYNESKGKPEEIEKKQEFVNQHVSYFDDILQLINDFSKRVILADANLEKINKLYQDNKENISVDELANNIINLFTFTSLGAPAAFKFFDKIVDRKRYTSTKEVLNSTLIHQSITGLYETRIDLGKLGED

SEQ ID NO: 64 - protein, 1370 aa, Streptococcus agalactiae
MNKPYSIGLDIGTNSVGWSIITDDYKVPAKKMRVLGNTDKEYIKKNLIGALLFDGGNTAADRRLKRTSRRRYTRRRNRILYLQEIFAEEMSKVDDSFFHRLEDSFLVEEDKRGSKYPIFATLQEEKDYHEKFSTIYHLRKELADKKEKADLRLIYIALAHIIKFRGHFLIEDDSFDVRNTDISKQYQDFLEIFNTTFENNDLLSQNVDVEAILTDKISKSAKKDRILAQYPNQKSTGIFAEFLKLIVGNQADFKKYFNLEDKTPLQFAKDSYDEDLENLLGQIGDEFADLFSAAKKLYDSVLLSGILTVIDLSTKAPLSASMIQRYDEHREDLKQLKQFVKASLPEKYQEIFADSSKDGYAGYIEGKTNQEAFYKYLSKLLTKQEDSENFLEKIKNEDFLRKQRTFDNGSIPHQVHLTELKAIIRRQSEYYPFLKENQDRIEKILTFRIPYYIGPLAREKSDFAWMTRKTDDSIRPWNFEDLVDKEKSAEAFIHRMTNNDFYLPEEKVLPKHSLIYEKFTVYNELTKVRYKNEQGETYFFDSNIKQEIFDGVFKEHRKVSKKKLLDFLAKEYEEFRIVDVIGLDKENKAFNASLGTYHDLEKILDKDFLDNPDNESILEDIVQTLTLFEDREMIKKRLENYKDLFTESQLKKLYRRHYTGWGRLSAKLINGIRDKESQKTILDYLIDDGRSNRNFMQLINDDGLSFKSIISKAQAGSHSDNLKEVVGELAGSPAIKKGILQSLKIVDELVKVMGYEPEQIVVEMARENQTTNQGRRNSRQRYKLLDDGVKNLASDLNGNILKEYPTDNQALQNERLFLYYLQNGRDMYTGEALDIDNLSQYDIDHIIPQAFIKDDSIDNRVLVSSAKNRGKSDDVPSLEIVKDCKVFWKKLLDAKLMSQRKYDNLTKAERGGLTSDDKARFIQRQLVETRQITKHVARILDERFNNELDSKGRRIRKVKIVTLKSNLVSNFRKEFGFYKIREVNNYHHAHDAYLNAVVAKAILTKYPQLEPEFVYGDYPKYNSYKTRKSATEKLFFYSNIMNFFKTKVTLADGTVVVKDDIEVNNDTGEIVWDKKKHFATVRKVLSYPQNNIVKKTEIQTGGFSKESILAHGNSDKLIPRKTKDIYLDPKKYGGFDSPIVAYSVLVVADIKKGKAQKLKTVTELLGITIMERSRFEKNPSAFLESKGYLNIRADKLIILPKYSLFELENGRRRLLASAGELQKGNELALPTQFMKFLYLASRYNESKGKPEEIEKKQEFVNQHVSYFDDILQLINDFSKRVILADANLEKINKLYQDNKENISVDELANNIINLFTFTSLGAPAAFKFFDKIVDRKRYTSTKEVLNSTLIHQSITGLYETRIDLGKLGED

SEQ ID NO: 65 - protein, 1370 aa, Streptococcus agalactiae
MNKPYSIGLDIGTNSVGYSVVTDDYKVPAKKMRVLGNTDKEYIKKNLIGALLFDGGNTASDRRLKRTARRRYTCRRNRILYLQEIFAEEMSKVDDSFFHRLEDSFLVEDDKRGSKYPIFATMQEEKDYHEKFPTIYHLRKELADKKEKANLRLVYLALAHIIKFRGHFLIEDDSFDVRNTDIQRQYQAFLEIFDTTFENNHLLSQNIDVEGILTDKISKSAKKDRILAQYPNQKSTGIFAEFLKLIVGNQADFKKHFNLEDKTPLQFAKDSYDEDLENLLGQIGDEFADLFSVAKKLYDSVLLSGILTVTDLSTKAPLSASMIQRYDEHREDLKQLKQFVKASLPEKYQEIFTDSSKDGYAGYIEGKTNQGAFYKYLSKLLTKQEGSEYFLEKIKNEDFLRKQRTFDNGSIPHQVHLTELKAIIRRQSEYYPFLKENLDRIEKILTFRIPYYVGPLAREKSDFAWMTRKTDDSIRPWNFEELVDKEASAEAFIHRMTNNDLYLPEEKVLPKHSLIYEKFTVYNELTKVRYKNEQGETYFFDSNIKQEIFDGVFKEHRKVSKKKLLDFLAKEYEEFRIVDVIGLDKENKAFNASLGTYHDLKKILDKDFLDNPDNESILEDIVQTLTLFEDREMIKKRLENYKDLFTESQLKKLYRRHYTGWGRLSAKLINGIRDKESQKTILDYLISDGRANRNFMQLIHDDGLSFKPIIDKAQAGSHSDNLKEVVGELAGSPAIKKGILQSLKIVDELVKVMGYEPEQVVVEMARENQTTNQGRRNTRQRYKLLEEGVKNLASDLNGNILKEYPTDNQALQNERLFLYYLQNGRDMYTGEALDIDNLSQYDIDHIVPQAFIKDDSIDNRVLVSSAKNRGKSDNVPSIDIVKARKAFWKKLLDAKLMSQRKYDNLTKAERGGLTSDDKARFIQRQLVETRQITKHVARILDERFNNELDSKGRRIRKVKIVTLKSNLVSNFRKEFGFYKIREVNDYHHAHDAYLNAVVAKAILTKYPQLEPEFVYGDYPKYNSYKTRKSATEKLFFYSNIMNFFKTKVTLADGTVVVKDDIEVNNDTGEIVWDKKKHFATVRKVLSYPQVNIVKKTEIQTGGFSKESILAHGNSDKLIPRKTKDIYLDPKKYGGFDSPIVAYSVLVVADIKKGKAQKLKTVTELLGITIMERFRFEKNPSAFLESKGYLNIRDDKLMILPKYSLFELENGRRRLLASAGELQKGNELALPTQYMKFLYLASRYNELKGKPEEIEQKQEFVVQHVSYFDDILQIINDFSNRVILADANLEKINKLYQDNKENISVDELANNIINLFTFTSLGAPAAFKFFDKIVDRKRYTSTKEVLNSTLIHQSITGLYETRIDLGKLGED

SEQ ID NO: 66 - protein, 1370 aa, Streptococcus agalactiae
MNKPYSIGLDIGTNSVGYSVVTDDYKVPAKKMRVLGNTDKEYIKKNLIGALLFDGGNTASDRRLKRTARRRYTRRRNRILYLQEIFAEEMSKVDDSFFHRLEDSFLVEDDKRGSKYPIFATMQEEKDYHEKFPTIYHLRKELADKKEKADLRLVYLALAHIIKFRGHFLIEDDSFDVRNTDIQRQYQAFLEIFDTTFENNHLLSQNIDVEGILTDKISKSAKKDRILAQYPNQKSTGIFAEFLKLIVGNQADFKKHFNLEDKTPLQFAKDSYDEDLENLLGQIGDEFADLFSVAKKLYDSVLLSGILTVTDLSTKAPLSASMIQRYDEHREDLKQLKQFVKASLPEKYQEIFTDSSKDGYAGYIEGKTNQGAFYKYLSKLLTKQEGSEYFLEKIKNEDFLRKQRTFDNGSIPHQVHLTELKAIIRRQSEYYPFLKENLDRIEKILTFRIPYYVGPLAREKSDFAWMTRKTDDSIRPWNFEELVDKEASAEAFIHRMTNNDLYLPEEKVLPKHSLIYEKFTVYNELTKVRYKNEQGETYFFDSNIKQEIFDGVFKEHRKVSKKKLLDFLAKEYEEFRIVDVIGLDKENKAFNASLGTYHDLKKILDKDFLDNPDNESILEDIVQTLTLFEDREMIKKRLENYKDLFTESQLKKLYRRHYTGWGRLSAKLINGIRDKESQKTILDYLISDGRANRNFMQLIHDDGLSFKPIIDKAQAGSHSDNLKEVVGELAGSPAIKKGILQSLKIVDELVKVMGYEPEQVVVEMARENQTTNQGRRNTRQRYKLLEEGVKNLASDLNGNILKEYPTDNQALQNERLFLYYLQNGRDMYTGEALDIDNLSQYDIDHIVPQAFIKDDSIDNRVLVSSAKNRGKSDNVPSIDIVKARKAFWKKLLDAKLMSQRKYDNLTKAERGGLTSDDKARFIQRQLVETRQITKHVARILDERFNNELDSKGRRIRKVKIVTLKSNLVSNFRKEFGFYKIREVNDYHHAHDAYLNAVVAKAILTKYPQLEPEFVYGDYPKYNSYKTRKSATEKLFFYSNIMNFFKTKVTLADGTVVVKDDIEVNNDTGEIVWDKKKHFATVRKVLSYPQVNIVKKTEIQTGGFSKESILAHGNSDKLIPRKTKDIYLDPKKYGGFDSPIVAYSVLVVADIKKGKAQKLKTVTELLGITIMERFRFEKNPSAFLESKGYLNIRDDKLMILPKYSLFELENGRRRLLASAGELQKGNELALPTQYMKFLYLASRYNELKGKPEEIEQKQEFVVQHVSYFDDILQIINDFSNRVILADANLEKINKLYQDNKENISVDELANNIINLFTFTSLGAPAAFKFFDKIVDRKRYTSTKEVLNSTLIHQSITGLYETRIDLGKLGED

SEQ ID NO: 67 - protein, 1370 aa, Streptococcus agalactiae
MNKPYSIGLDIGTNSVGYSVVTDDYKVPAKKMRVLGNTDKEYIKKNLIGALLFDGGNTASDRRLKRTARRRYTRRRNRILYLQEIFAEEMSKVDDSFFHRLEDSFLVEDDKRGSKYPIFATMQEEKDYHEKFPTIYHLRKELADKKEKADLRLVYLALAHIIKFRGHFLIEDDSFDVRNTDIQRQYQAFLEIFDTTFENNHLLSQNIDVEGILTDKISKSAKKDRILAQYPNQKSTGIFAEFLKLIVGNQADFKKHFNLEDKTPLQFAKDSYDEDLENLLGQIGDEFADLFSVAKKLYDSVLLSGILTVTDLSTKAPLSASMIQRYDEHREDLKQLKQFVKASLPEKYQEIFTDSSKDGYAGYIEGKTNQGAFYKYLSKLLTKQEGSEYFLEKIKNEDFLRKQRTFDNGSIPHQVHLTELKAIIRRQSEYYPFLKENLDRIEKILTFRIPYYVGPLAREKSDFAWMTRKTDDSIRPWNFEELVDKEASAEAFIHRMTNNDLYLPEEKVLPKHSLIYEKFTVYNELTKVRYKNEQGETYFFDSNIKQEIFDGVFKEHRKVSKKKLLDFLAKEYEEFRIVDVIGLDKENKAFNASLGTYHDLKKILDKDFLDNPDNESILEDIVQTLTLFEDREMIKKRLENYKDLFTESQLKKLYRRHYTGWGRLSAKLINGIRDKESQKTILDYLISDGRANRNFMQLIHDDGLSFKPIIDKAQAGSHSDNLKEVVGELAGSPAIKKGILQSLKIVDELVKVMGYEPEQVVVEMARENQTTNQGRRNTRQRYKLLEEGVKNLASDLNGNILKEYPTDNQALQNERLFLYYLQNGRDMYTGETLDIDNLSQYDIDHIVPQAFIKDDSIDNRVLVSSAKNRGKSDNVPSIDIVKARKAFWKKLLDAKLMSQRKYDNLTKAERGGLTSDDKARFIQRQLVETRQITKHVARILDERFNNELDSKGRRIRKVKIVTLKSNLVSNFRKEFGFYKIREVNDYHHAHDAYLNAVVAKAILTKYPQLEREFVYGDYPKYNSYKTRKSATEKLFFYSNIMNFFKTKVTLADGTVVVKDDIEVNNDTGEIVWDKKKHFATVRKVLSYPQVNIVKKTEIQTGGFSKESILAHGNSDKLIPRKTKDIYLDPKKYGGFDSPIVAYSVLVVADIKKGKAQKLKTVTELLGITIMERFRFEKNPSAFLESKGYLNIRDDKLMILPKYSLFELENGRRRLLASAGELQKGNELALPTQYMKFLYLASRYNELKGKPEEIEQKQEFVVQHVSYFDDILQIINDFSNRVILADANLEKINKLYQDNKENISVDELANNIINLFTFTSLGAPAAFKFFDKIVDRKRYTSTKEVLNSTLIHQSITGLYETRIDLGKLGED

SEQ ID NO: 68 - protein, 1370 aa, Streptococcus agalactiae
MNKPYSIGLDIGTNSVGYSVVTDDYKVPAKKMRVLGNTDKEYIKKNLIGALLFDGGNTASDRRLKRTARRRYTRRRNRILYLQEIFAEEMSKVDDSFFHRLEDSFLVEDDKRGSKYPIFATMQEEKDYHEKFPTIYHLRKELADKKEKANLRLVYLALAHIIKFRGHFLIEDDSFDVRNTDIQRQYQAFLEIFDTTFENNHLLSQNIDVEGILTDKISKSAKKDRILAQYPNQKSTGIFAEFLKLIVGNQADFKKHFNLEDKTPLQFAKDSYDEDLENLLGQIGDEFADLFSVAKKLYDSVLLSGILTVTDLSTKAPLSASMIQRYDEHREDLKQLKQFVKASLPEKYQEIFTDSSKDGYAGYIEGKTNQGAFYKYLSKLLTKQEGSEYFLEKIKNEDFLRKQRTFDNGSIPHQVHLTELKAIIRRQSEYYPFLKENLDRIEKILTFRIPYYVGPLAREKSDFAWMTRKTDDSIRPWNFEELVDKEASAEAFIHRMTNNDLYLPEEKVLPKHSLIYEKFTVYNELTKVRYKNEQGETYFFDSNIKQEIFDGVFKEHRKVSKKKLLDFLAKEYEEFRIVDVIGLDKENKAFNASLGTYHDLKKILDKDFLDNPDNESILEDIVQTLTLFEDREMIKKRLENYKDLFTESQLKKLYRRHYTGWGRLSAKLINGIRDKESQKTILDYLISDGRANRNFMQLIHDDGLSFKPIIDKAQAGSHSDNLKEVVGELAGSPAIKKGILQSLKIVDELVKVMGYEPEQVVVEMARENQTTNQGRRNTRQRYKLLEEGVKNLASDLNGNILKEYPTDNQALQNERLFLYYLQNGRDMYTGEALDIDNLSQYDIDHIVPQAFIKDDSIDNRVLVSSAKNRGKSDNVPSIDIVKARKAFWKKLLDAKLMSQRKYDNLTKAERGGLTSDDKARFIQRQLVETRQITKHVARILDERFNNELDSKGRRIRKVKIVTLKSNLVSNFRKEFGFYKIREVNDYHHAHDAYLNAVVAKAILTKYPQLEPEFVYGDYPKYNSYKTRKSATEKLFFYSNIMNFFKTKVTLADGTVVVKDDIEVNNDTGEIVWDKKKHFATVRKVLSYPQVNIVKKTEIQTGGFSKESILAHGNSDKLIPRKTKDIYLDPKKYGGFDSPIVAYSVLVVADIKKGKAQKLKTVTELLGITIMERFRFEKNPSAFLESKGYLNIRDDKLMILPKYSLFELENGRRRLLASAGELQKGNELALPTQYMKFLYLASRYNELKGKPEEIEQKQEFVVQHVSYFDDILQIINDFSNRVILADANLEKINKLYQDNKENISVDELANNIINLFTFTSLGAPAAFKFFDKIVDRKRYTSTKEVLNSTLIHQFITGLYETRIDLGKLGED

SEQ ID NO: 69 - protein, 1370 aa, Streptococcus agalactiae
MNKPYSIGLDIGTNSVGYSVVTDDYKVPAKKMRVLGNTDKEYIKKNLIGALLFDGGNTASDRRLKRTARRRYTRRRNRILYLQEIFAEEMSKVDDSFFHRLEDSFLVEDDKRGSKYPIFATMQEEKDYHEKFPTIYHLRKELADKKEKANLRLVYLALAHIIKFRGHFLIEDDSFDVRNTDIQRQYQAFLEIFDTTFENNHLLSQNIDVEGILTDKISKSAKKDRILAQYPNQKSTGIFAEFLKLIVGNQADFKKHFNLEDKTPLQFAKDSYDEDLENLLGQIGDEFADLFSVAKKLYDSVLLSGILTVTDLSTKAPLSASMIQRYDEHREDLKQLKQFVKASLPEKYQEIFTDSSKDGYAGYIEGKTNQGAFYKYLSKLLTKQEGSEYFLEKIKNEDFLRKQRTFDNGSIPHQVHLTELKAIIRRQSEYYPFLKENLDRIEKILTFRIPYYVGPLAREKSDFAWMTRKTDDSIRPWNFEELVDKEASAEAFIHRMTNNDLYLPEEKVLPKHSLIYEKFTVYNELTKVRYKNEQGETYFFDSNIKQEIFDGVFKEHRKVSKKKLLDFLAKEYEEFRIVDVIGLDKENKAFNASLGTYHDLKKILDKDFLDNPDNESILEDIVQTLTLFEDREMIKKRLENYKDLFTESQLKKLYRRHYTGWGRLSAKLINGIRDKESQKTILDYLISDGRANRNFMQLIHDDGLSFKPIIDKAQAGSHSDNLKEVVGELAGSPAIKKGILQSLKIVDELVKVMGYEPEQVVVEMARENQTTNQGRRNTRQRYKLLEEGVKNLASDLNGNILKEYPTDNQALQNERLFLYYLQNGRDMYTGEALDIDNLSQYDIDHIVPQAFIKDDSIDNRVLVSSAKNRGKSDNVPSIDIVKARKAFWKKLLDAKLMSQRKYDNLTKAERGGLTSDDKARFIQRQLVETRQITKHVARILDERFNNELDSKGRRIRKVKIVTLKSNLVSNFRKEFGFYKIREVNDYHHAHDAYLNAVVAKAILTKYPQLEPEFVYGDYPKYNSYKTRKSATEKLFFYSNIMNFFKTKVTLADGTVVVKDDIEVNNDTGEIVWDKKKHFATVRKVLSYPQVNIVKKTEIQTGGFSKESILAHGNSDKLIPRKTKDIYLDPKKYGGFDSPIVAYSVLVVADIKKGKAQKLKTVTELLGITIMERFRFEKNPSAFLESKGYLNIRDDKLMILPKYSLFELENGRRRLLASAGELQKGNELALPTQYMKFLYLASRYNELKGKPEEIEQKQEFVVQHVSYFDDILQIINDFSNRVILADANLEKINKLYQDNKENISVDELANNIINLFTFTSLGAPAAFKFFDKIVDRKRYTSTKEVLNSTLIHQSITGLYETRIDLGKLGED

SEQ ID NO: 70 - protein, 1370 aa, Streptococcus agalactiae
MNKPYSIGLDIGTNSVGWSIITDDYKVPAKKMRVLGNTDKEYIKKNLIGALLFDGGNTAADRRLKRTARRRYTRRRNRILYLQEIFAEEMSKVDDSFFHRLEDSFLVEEDKRGSKYPIFATMQEEKDYHEKFPTIYHLRKELADKKEKADLRLVYLALAHIIKFRGHFLIEDDRFDVRNTDIQKQYQAFLEIFDTSFENNHLLSQNVDVEAILTDKISKSAKKDRILAQYPNQKSTGIFAEFLKLIVGNQADFKKHFNLEDKTPLQFAKDSYDEDLENLLGQIGDEFADLFSAAKKLYDSVLLSGILTVTDLSTKAPLSASMIQRYDEHREDLKQLKQFVKASLPEKYQEIFADSSKDGYAGYIEGKTNQEAFYKYLSKLLTKQEDSEYFLEKIKNEDFLRKQRTFDNGSIPHQVHLTELKAIIRRQSEYYPFLKENQDKIEKILTFRIPYYVGPLARGNSDFAWMTRKTDDSIRPWNFEDLVDKEKSAEAFIHRMTNNDLYLPEEKVLPKHSLIYEKFTVYNELTKVRYKNEQGETYFFDSNVKQEIFDGVFKEHRKVSKKQLLDFLAKEFEEFRIVDVTGLDKENKAFNASLGTYHDLKKILDKDFLDNPDNESILEDIVQTITLFEDREMIKKRLENYKDLFTESQLKKLYRRHYTGWGRLSAKLINGIRDRESQKTILDYLISDGRANRNFMQLINDDGLSFKSIISKAQSGSHSDNLKEVVGELAGSPAIKKGILQSLKIVDELVKVMGYEPEQIVVEMARENQTTNQGRRNSRQRYKLLEDGVKNLASDLNGDILKEYPTDNQALQNERLFLYYLQNGRDMYTGEALDIDNLSQYDIDHIVPQAFIKDDSIDNRVLVSSAKNRGKSDDVPSIDIVKARKAFWKKLLDAKLISQRKYDNLTKAERGGLTPDDKAGFIQRQLVETRQITKHVARILDERFNNKVDDNNKPIRKVKIVTLKSNLVSNFRKEFGFYKIREVNNYHHAHDAYLNAVVAKAILTKYPQLEPEFVYGDYPKYNSYKTRKSATEKLFFYSNIMNFFKTKVTLADETVVVKDDIEVNNETGEIAWDKKKHFATVRKVLSYPQVNIVKKTEVQTGGFSKESILAHSNSDKLIPRKTKDIYLDPKKYGGFDSPIVAYSVLVLADIKKGKAQKLKTVKELIGITIMERERFEKNPSAFLESKGYLNIRTDKLIILPKYSLFELENGRRRLLASAGELQKGNELALPTQYMKFLYLASRYNESKGKPEEIEKKQEFVNQHVSYFDDILQLINDFSKRVILADANLEKINKLYSDNKDNTPVDELAKNIINLFTFTSLGAPAAFKFFDKSVDRKRYTSTKEVLDSTLIHQSITGLYETRIDLGKLGED

SEQ ID NO: 71 - protein, 1370 aa, Streptococcus agalactiae
MNKPYSIGLDIGTNSVGWSIITDDYKVPAKKMRVLGNTDKEYIKKNLIGALLFDGGNTAADRRLKRTARRRYTRRRNRILYLQEIFAEEMSKVDDSFFHRLEDSFLVEEDKRGSKYPIFATMQEEKYYHEKFPTIYHLRKELADKKEKADLRLIYLALAHIIKFRGHFLIEDDRFDVRNTDIQKQYQAFLEIFDTTFENNDLLSQNVDVEAILTDKISKSAKKDRILARYPNQKSTGIFAEFLKLIVGNQADFKKHFNLEDKTPLQFAKDSYDEDLENLLGQIGDEFADLFSAAKKLYDSVLLSGILTVTDLSTKAPLSASMIQRYDEHREDLKQLKQFVKASLPEKYQEIFADSSKDGYAGYIEGKTNQEAFYKYLSKLLTKQEGSEYLLEKIKNEDFLRKQRTFDNGSIPHQVHLTELRAIIRRQSEYYPFLKENLDRIEKILTFRIPYYVGPLAREKSDFAWMTRKTDDSIRPWNFEDLVDKEKSAEAFIHRMTNNDLYLPEEKVLPKHSLIYEKFTVYNELTKVRFLAEGFKDFQFLNRKQKETIFNSLFKEKRKVTEKDIISFLNKVDGYEGIAIKGIEKQFNASLSTYHDLKKILGKDFLDNTDNELILEDIVQTLTLFEDREMIRKRLDIYKDFFTESQLKKLYRRHYTGWGRLSAKLINGIRNKENQKTILDYLIDDGSANRNFMQLIKDAGLSFKPIIDKARTGSHSDNLKEVVGELAGSPAIKKGILQSLKIVDELVKVMGYEPEQIVVEMARENQTTAKGLSRLRQRLTTLRESLANLKSNILEEKKPKYVKDQVENHHLSDDRLFLYYLQNGKDMYTDDELDIDNLSQYDIDLIIPQAFIKDDSIDNRVLVSSAKNRGKSDDVPSVEIVKDCKVFWKKLLDAKLMSQRKYDNLTKAERGGLTSDDKARFIQRQLVETRQITKHVARILDERFNNELDSKGRRIRKVKIVTLKSNLVSNFRKEFGFYKIREVNNYHHAHDAYLNAVVAKAILTKYPQLEPEFVYGDYPKYNSYKTRKSATEKLFFYSNIMNFFKTKVTLADGTVVVKDDIEVNNDTGEIVWDKKKHFATVRKVLSYPQVNIVKKTEIQTGGFSKESILAHGNSDKLIPRKTKDIYLDPKKYGGFDSPIVAYSVLVVADIKKGKAQKLKTVTELLGITIMERSRFEKNPSAFLESKGYLNIRDDKLMILPKYSLFELENGRRRLLASADELQKGNELALPTQFMKFLYLASRYNELKGKPEEIEQKQEFVVQHVSYFDDILQIINDFSNRVILADANLEKINKLYQDNKENIPVDELANNIINLFTFTSLGAPAAFKFFDKIVDRKRYTSTKEVLNSTLIHQSITGLYETRIDLGKLGED

SEQ ID NO: 72 - protein, 1370 aa, Streptococcus agalactiae
MNKPYSIGLDIGTNSVGWSIITDDYKVPAKKMRVLGNTDKEYIKKNLIGALLFDGGNTASDRRLKRTARRRYTRRRNRILYLQEIFAEEMSKVDDSFFHRLEDSFLVEDDKRGSKYPIFATMQEEKDYHEKFPTIYHLRKELADKKEKADLRLFYLALAHIIKFRGHFLIEDDSFDVRNTDIQRQYQAFLEIFDTTFENNHLLSQNIDIEGILTDKISKSAKKDRILAQYPNQKSTGIFAEFLKLIVGNQADFKKHFNLEDKTPLQFAKDSYDEDLENLLGQIGDEFADLFSVAKKLYDSVLLSGILTVTDLSTKAPLSASMIQRYDEHREDLKQLKQFVKASLPEKYQEIFTDSSKDGYAGYIEGKTNQGAFYKYLSKLLTKQEGSEYFLEKIKNEDFLRKQRTFDNGSIPHQVHLTELKAIIRRQSEYYPFLKENLDRIEKILTFRIPYYVGPLAREKSDFAWMTRKTDDSIRPWNFEELVDKEASAEAFIHRMTNNDLYLPEEKVLPKHSLIYEKFTVYNELTKVRYKNEQGETYFFDSNIKQEIFDGVFKEHRKVSKKKLLDFLAKEYEEFRIVDVIGLDKENKAFNASLGTYHDLKKILDKDFLDNPDNESILEDIVQTLTLFEDREMIKKRLENYKDLFTESQLKKLYRRHYTGWGRLSAKLINGIRDKESQKTILDYLIDDGKSNRNFMQLIHDDGLSFKSIISKAQAGSHSDNLKEVVGELAGSPAIKKGILQSLKIVDELVKVMGYEPEQIVVEMARENQTTNQGRRNSRQRYKLLDDGVKNLASDLNGNILKEYPTDNQALQNERLFLYYLQNGRDMYTGKALDIDNLSQYDIDHIIPQAFIKDDSIDNRVLVSSAKNRGKSDDVPSLEIVKDCKVFWKKLLDAKLMSQRKYDNLTKAERGGLTSDDKARFIQRQLVETRQITKHVARILDERFNNELDSKGRRIRKVKIVTLKSNLVSNFRKEFGFYKIREVNNYHHAHDAYLNAVVAKAILTKYPQLEPEFVYGDYPKYNSYKTRKSATEKLFFYSNIMNFFKTKVTLADGTVVVKDDIEVNNDTGEIVWDKKKHFATVRKVLSYPQVNIVKKTEIQTGGFSKESILAHGNSDKLIPRKTKDIYLDPKKYGGFDSPIVAYSVLVVADIKKGKAQKLKTVTELLGITIMERSRFEKNPSAFLESKGYLNIRDDKLMILPKYSLFELENGRRRLLASAGELQKGNELALPTQFMKFLYLASRYNELKGKPEEIEQKQEFVVQHVSYFDDILQIINDFSNRVILADANLEKINKLYQDNKENISVDELANNIINLFTFTSLGAPAAFKFFDKIVDRKRYTSTKEVLNSTLIHQSITGLYETRIDLGKLGED

SEQ ID NO: 73 - protein, 1370 aa, Streptococcus agalactiae
MNKPYSIGLDIGTNSVGWSIITDDYKVPAKKMRVLGNTDKEYIKKNLIGALLFDGGNTASDRRLKRTARRRYTRRRNRILYLQEIFAEEMSKVDDSFFHRLEDSFLVEDDKRGSKYPIFATMQEEKDYHEKFPTIYHLRKELADKKEKADLRLFYLALAHIIKFRGHFLIEDDSFDVRNTDIQRQYQAFLEIFDTTFENNHLLSQNIDVEGILTDKISKSAKKDRILAQYPNQKSTGIFAEFLKLIVGNQADFKKHFNLEDKTPLQFAKDSYDEDLENLLGQIGDEFADLFSVAKKLYDSVLLSGILTVTDLSTKAPLSASMIQRYDEHREDLKQLKQFVKASLPEKYQEIFTDSSKDGYAGYIEGKTNQGAFYKYLSKLLTKQEGSEYFLEKIKNEDFLRKQRTFDNGSIPHQVHLTELKAIIRRQSEYYPFLKENLDRIEKILTFRIPYYVGPLAREKSDFAWMTRKTDDSIRPWNFEELVDKEASAEAFIHRMTNNDLYLPEEKVLPKHSLIYEKFTVYNELTKVRYKNEQGETYFFDSNIKQEIFDGVFKEHRKVSKKKLLDFLAKEYEEFRIVDVIGLDKENKAFNASLGTYHDLKKILDKDFLDNPDNESILEDIVQTLTLFEDREMIKKRLENYKDLFTESQLKKLYRRHYTGWGRLSAKLINGIRDKESQKTILDYLIDDGKSNRNFMQLIHDDGLSFKSIISKAQAGSHSDNLKEVVGELAGSPAIKKGILQSLKIVDELVKVMGYEPEQIVVEMARENQTTNQGRRNSRQRYKLLDDGVKNLASDLNGNILKEYPTDNQALQNERLFLYYLQNGRDMYTGKALDIDNLSQYDIDHIIPQAFIKDDSIDNRVLVSSAKNRGKSDDVPSLEIVKDCKVFWKKLLDAKLMSQRKYDNLTKAERGGLTSDDKARFIQRQLVETRQITKHVARILDERFNNELDSKGRRIRKVKIVTLKSNLVSNFRKEFGFYKIREVNNYHHAHDAYLNAVVAKAILTKYPQLEPEFVYGDYPKYNSYKTRKSATEKLFFYSNIMNFFKTKVTLADGTVVVKDDIEVNNDTGEIVWDKKKHFATVRKVLSYPQVNIVKKTEIQTGGFSKESILAHGNSDKLIPRKTKDIYLDPKKYGGFDSPIVAYSVLVVADIKKGKAQKLKTVTELLGITIMERSRFEKNPSAFLESKGYLNIRDDKLMILPKYSLFELENGRRRLLASAGELQKGNELALPTQFMKFLYLASRYNELKGKPEEIEQKQEFVVQHVSYFDDILQIINDFSNRVILADANLEKINKLYQDNKENISVDELANNIINLFTFTSLGAPAAFKFFDKIVDRKRYTSTKEVLNSTLIHQSITGLYETRIDLGKLGED

SEQ ID NO: 74 - protein, 1370 aa, Streptococcus agalactiae
MNKPYSIGLDIGTNSVGWSIITDDYKVPAKKMRVLGNTDKEYIKKNLIGALLFDGGNTAADRRLKRTARRRYTRRRNRILYLQEIFAEEMSKVDDSFFHRLEDSFLVEEDKRGSKYPIFATLQEEKDYHEKFPTIYHLRKELADKKEKADLRLIYIALAHIIKFRGHFLIEDDSFDVRNTDISKQYQDFLEIFNTTFENNDLLSQNVDVEAILTDKISKSAKKDRILAQYPNQKSTGIFAEFLKLIVGNQADFKKYFNLEDKTPLQFAKDSYDEDLENLLGQIGDEFADLFSAAKKLYDSVLLSGILTVIDLSTKAPLSASMIQRYDEHREDLKQLKQFVKASLPEKYQEIFADSSKDGYAGYIEGKTNQEAFYKYLSKLLTKQEDSENFLEKIKNEDFLRKQRTFDNGSIPHQVHLTELKAIIRRQSEYYPFLKENQDRIEKILTFRIPYYIGPLAREKSDFAWMTRKTDDSIRPWNFEDLVDKEKSAEAFIHRMTNNDFYLPEEKVLPKHSLIYEKFTVYNELTKVRYKNEQGETYFFDSNIKQEIFDGVFKEHRKVSKKKLLDFLAKEYEEFRIVDVIGLDKENKAFNASLGTYHDLEKILDKDFLDNPDNESILEDIVQTLTLFEDREMIKKRLENYKDLFTESQLKKLYRRHYTGWGRLSAKLINGIRDKESQKTILDYLIDDGRSNRNFMQLINDDGLSFKSIISKAQAGSHSDNLKEVVGELAGSPAIKKGILQSLKIVDELVKVMGYEPEQIVVEMARENQTTNQGRRNSRQRYKLLDDGVKNLASDLNGNILKEYPTDNQALQNERLFLYYLQNGRDMYTGEALDIDNLSQYDIDHIIPQAFIKDDSIDNRVLVSSAKNRGKSDDVPSLEIVKDCKVFWKKLLDAKLMSQRKYDNLTKAERGGLTSDDKARFIQRQLVETRQITKHVARILDERFNNELDSKGRRIRKVKIVTLKSNLVSNFRKEFGFYKIREVNNYHHAHDAYLNAVVAKAILTKYPQLEPEFVYGDYPKYNSYKTRKSATEKLFFYSNIMNFFKTKVTLADGTVVVKDDIEVNNDTGEIVWDKKKHFATVRKVLSYPQNNIVKKTEIQTGGFSKESILAHGNSDKLIPRKTKDIYLDPKKYGGFDSPIVAYSVLVVADIKKGKAQKLKTVTELLGITIMERSRFEKNPSAFLESKGYLNIRADKLIILPKYSLFELENGRRRLLASAGELQKGNELALPTQFMKFLYLASRYNESKGKPEEIEKKQEFVNQHVSYFDDILQLINDFSKRVILADANLEKINKLYQDNKENISVDELANNIINLFTFTSLGAPAAFKFFDKIVDRKRYTSTKEVLNSTLIHQSITGLYETRIDLGKLGED

SEQ ID NO: 75 - protein, 1370 aa, Streptococcus agalactiae
MNKPYSIGLDIGTNSVGYSVVTDDYKVPAKKMRVLGNTDKEYIKKNLIGALLFDGGNTASDRRLKRTARRRYTRRRNRILYLQEIFAEEMSKVDDSFFHRLEDSFLVEDDKRGSKYPIFATMQEEKDYHEKFPTIYHLRKELADKKEKADLRLVYLALAHIIKFRGHFLIEDDSFDVRNTDIQRQYQAFLEIFDTTFENNHLLSQNIDVEGILTDKISKSAKKDRILAQYPNQKSTGIFAEFLKLIVGNQADFKKHFNLEDKTPLQFAKDSYDEDLENLLGQIGDEFADLFSVAKKLYDSVLLSGILTVTALSTKAPLSASMIQRYDEHREDLKQLKQFVKASLPEKYQEIFTDSSKDGYAGYIEGKTNQGAFYKYLSKLLTKQEGSEYFLEKIKNEDFLRKQRTFDNGSIPHQVHLTELKAIIRRQSEYYPFLKENLDRIEKILTFRIPYYVGPLAREKSDFAWMTRKTDDSIRPWNFEELVDKEASAEAFIHRMTNNDLYLPEEKVLPKHSLIYEKFTVYNELTKVRYKNEQGETYFFDSNIKQEIFDGVFKEHRKVSKKKLLDFLAKEYEEFRIVDVIGLDKENKAFNASLGTYHDLKKILDKDFLDNPDNESILEDIVQTLTLFEDREMIKKRLENYKDLFTESQLKKLYRRHYTGWGRLSAKLINGIRDKESQKTILDYLISDGRANRNFMQLIHDDGLSFKPIIDKAQAGSHSDNLKEVVGELAGSPAIKKGILQSLKIVDELVKVMGYEPEQVVVEMARENQTTNQGRRNTRQRYKLLEEGVKNLASDLNGNILKEYPTDNQALQNERLFLYYLQNGRDMYTGEALDIDNLSQYDIDHIVPQAFIKDDSIDNRVLVSSAKNRGKSDNVPSIDIVKARKAFWKKLLDAKLMSQRKYDNLTKAERGGLTSDDKARFIQRQLVETRQITKHVARILDERFNNELDSKGRRIRKVKIVTLKSNLVSNFRKEFGFYKIREVNDYHHAHDAYLNAVVAKAILTKYPQLEPEFVYGDYPKYNSYKTRKSATEKLFFYSNIMNFFKTKVTLADGTVVVKDDIEVNNDTGEIVWDKKKHFATVRKVLSYPQVNIVKKTEIQTGGFSKESILAHGNSDKLIPRKTKDIYLDPKKYGGFDSPIVAYSVLVVADIKKGKAQKLKTVTELLGITIMERFRFEKNPSAFLESKGYLNIRDDKLMILPKYSLFELENGRRRLLASAGELQKGNELALPTQYMKFLYLASRYNELKGKPEEIEQKQEFVVQHVSYFDDILQIINDFSNRVILADANLEKINKLYQDNKENISVDELANNIINLFTFTSLGAPAAFKFFDKIVDRKRYTSTKEVLNSTLIHQSITGLYETRIDLGKLGED

SEQ ID NO: 76 - protein, 1370 aa, Streptococcus agalactiae
MNKPYSIGLDIGTNSVGWSIITDDYKVPAKKMRVLGNTDKEYIKKNLIGALLFDGGNTAADRRLKRTARRRYTRRRNRILYLQEIFAEEMSKVDDSFFHRLEDSFLVEEDKRGSKYPIFATLQEEKDYHEKFSTIYHLRKELADKKEKADLRLIYIALAHIIKFRGHFLIEDDSFDVRNTDISKQYQDFLEIFNTTFENNDLLSQNVDVEAILTDKISKSAKKDRILAQYPNQKSTGIFAEFLKLIVGNQADFKKYFNLEDKTPLQFAKDSYDEDLENLLGQIGDEFADLFSAAKKLYDSVLLSGILTVIDLSTKAPLSASMIQRYDEHREDLKQLKQFVKASLPEKYQEIFADSSKDGYAGYIEGKTNQEAFYKYLSKLLTKQEDSENFLEKIKNEDFLRKQRTFDNGSIPHQVHLTELKAIIRRQSEYYPFLKENQDRIEKILTFRIPYYIGPLAREKSDFAWMTRKTDDSIRPWNFEDLVDKEKSAEAFIHRMTNNDFYLPEEKVLPKHSLIYEKFTVYNELTKVRYKNEQGETYFFDSNIKQEIFDGVFKEHRKVSKKKLLDFLAKEYEEFRIVDVIGLDKENKAFNASLGTYHDLEKILDKDFLDNPDNESILEDIVQTLTLFEDREMIKKRLENYKDLFTESQLKKLYRRHYTGWGRLSAKLINGIRDKESQKTILDYLIDDGRSNRNFMQLINDDGLSFKSIISKAQAGSHSDNLKEVVGELAGSPAIKKGILQSLKIVDELVKVMGYEPEQIVVEMARENQTTNQGRRNSRQRYKLLDDGVKNLASDLNGNILKEYPTDNQALQNERLFLYYLQNGRDMYTGEALDIDNLSQYDIDHIIPQAFIKDDSIDNRVLVSSAKNRGKSDDVPSLEIVKDCKVFWKKLLDAKLMSQRKYDNLTKAERGGLTSDDKARFIQRQLVETRQITKHVARILDERFNNELDSKGRRIRKVKIVTLKSNLVSNFRKEFGFYKIREVNNYHHAHDAYLNAVVAKAILTKYPQLEPEFVYGDYPKYNSYKTRKSATEKLFFYSNIMNFFKTKVTLADGTVVVKDDIEVNNDTGEIVWDKKKHFATVRKVLSYPQNNIVKKTEIQTGGFSKESILAHGNSDKLIPRKTKDIYLDPKKYGGFDSPIVAYSVLVAADIKKGKAQKLKTVTELLGITIMERSRFEKNPSAFLESKGYLNIRADKLIILPKYSLFELENGRRRLLASAGELQKGNELALPTQFMKFLYLASRYNESKGKPEEIEKKQEFVNQHVSYFDDILQLINDFSKRVILADANLEKINKLYQDNKENISVDELANNIINLFTFTSLGAPAAFKFFDKIVDRKRYTSTKEVLNSTLIHQSITGLYETRIDLGKLGED

SEQ ID NO: 77 - protein, 1370 aa, Streptococcus agalactiae
MNKPYSIGLDIGTNSVGWSIITDDYKVPAKKMRVLGNTDKEYIKKNLIGALLFDGGNTAADRRLKRTARRRYTRRRNRILYLQEIFAEEMSKVDDSFFHRLEDSFLVEEDKRGSKYPIFATLQEEKDYHEKFSTIYHLRKELADKKEKADLRLIYIALAHIIKFRGHFLIEDDSFDVRNTDISKQYQDFLEIFNTTFENNDLLSQNVDVEAILTDKISKSAKKDRILAQYPNQKSTGIFAEFLKLIVGNQADFKKYFNLEDKTPLQFAKDSYDEDLENLLGQIGDEFADLFSAAKKLYDSVLLSGILTVIDLSTKASLSDSMIQRYDEHREDLKQLKQFVKASLPEKYQEIFADSSKDGYAGYIEGKTNQEAFYKYLSKLLTKQEDSENFLEKIKNEDFLRKQRTFDNGSIPHQVHLTELKAIIRRQSEYYPFLKENQDRIEKILTFRIPYYIGPLAREKSDFAWMTRKTDDSIRPWNFEDLVDKEKSAEAFIHRMTNNDFYLPEEKVLPKHSLIYEKFTVYNELTKVRYKNEQGETYFFDSNIKQEIFDGVFKEHRKVSKKKLLDFLAKEYEEFRIVDVIGLDKENKAFNASLGTYHDLEKILDKDFLDNPDNESILEDIVQTLTLFEDREMIKKRLENYKDLFTESQLKKLYRRHYTGWGRLSAKLINGIRDKESQKTILDYLIDDGRSNRNFMQLINDDGLSFKSIISKAQAGSHSDNLKEVVGELAGSPAIKKGILQSLKIVDELVKVMGYEPEQIVVEMARENQTTNQGRRNSRQRYKLLDDGVKNLASDLNGNILKEYPTDNQALQNERLFLYYLQNGRDMYTGEALDIDNLSQYDIDHIIPQAFIKDDSIDNRVLVSSAKNRGKSDDVPSLEIVKDCKVFWKKLLDAKLMSQRKYDNLTKAERGGLTSDDKARFIQRQLVETRQITKHVARILDERFNNELDSKGRRIRKVKIVTLKSNLVSNFRKEFGFYKIREVNNYHHAHDAYLNAVVAKAILTKYPQLEPEFVYGDYPKYNSYKTRKSATEKLFFYSNIMNFFKTKVTLADGTVVVKDDIEVNNDTGEIVWDKKKHFATVRKVLSYPQNNIVKKTEIQTGGFSKESILAHGNSDKLIPRKTKDIYLDPKKYGGFDSPIVAYSVLVVADIKKGKAQKLKTVTELLGITIMERSRFEKNPSAFLESKGYLNIRADKLIILPKYSLFELENGRRRLLASAGELQKGNELALPTQFMKFLYLASRYNESKGKPEEIEKKQEFVNQHVSYFDDILQLINDFSKRVILADANLEKINKLYQDNKENISVDELANNIINLFTFTSLGAPAAFKFFDKIVDRKRYTSTKEVLNSTLIHQSITGLYETRIDLGKLGED

SEQ ID NO: 78 - protein, 1370 aa, Streptococcus agalactiae
MNKPYSIGLDIGTNSVGWSIITDDYKVPAKKMRVLGNTDKEYIKKNLIGALLFDGGNTAADRRLKRTARRRYTRRRNRILYLQEIFAEEMSKVDDSFFHRLEDSFLVEEDKRGSKYPIFATLQEEKDYHEKFSTIYHLRKELADKKEKADLRLIYIALAHIIKFRGHFLIEDDSFDVRNTDISKQYQDFLEIFNTTFENNDLLSQNVDVEAILTDKISKSAKKDRILAQYPNQKSTGIFAEFLKLIVGNQADFKKYFNLEDKTPLQFAKDSYDEDLENLLGQIGDEFADLFSAAKKLYDSVLLSGILTVIDLSTKAPLSASMIQRYDEHREDLKQLKQFVKASLPEKYQEIFADSSKDGYAGYIEGKTNQEAFYKYLSKLLTKQEDSENFLEKIKNEDFLRKQRTFDNGSIPHQVHLTELKAIIRRQSEYYPFLKENQDRIEKILTFRIPYYIGPLAREKSDFAWMTRKTDDSIRPWNFEDLVDKEKSAEAFIHRMTNNDFYLPEEKVLPKHSLIYEKFTVYNELTKVRYKNEQGETYFFDSNIKQEIFDGVFKEHRKVSKKKLLDFLAKEYEEFRIVDVIGLDKENKAFNASLGTYHDLEKILDKDFLDNPDNESILEDIVQTLTLFEDREMIKKRLENYKDLFTESQLKKLYRRHYTGWGRLSAKLINGIRDKESQKTILDYLIDDGRSNRNFMQLINDDGLSFKSIISKAQAGSHSDNLKEVVGELAGSPAIKKGILQSLKIVDELVKVMGYEPEQIVVEMARENQTTNQGRRNSRQRYKLLDDGVKNLASDLNGNILKEYPTDNQALQNERLFLYYLQNGRDMYTGEALDIDNLSQYDIDHIIPQAFIKDDSIDNRVLVSSAKNRGKSDDVPSLEIVKDCKVFWKKLLDAKLMSQRKYDNLTKAERGGLTSDDKARFIQRQLVEIRQITKHVARILDERFNNELDSKGRRIRKVKIVTLKSNLVSNFRKEFGFYKIREVNNYHHAHDAYLNAVVAKAILTKYPQLEPEFVYGDYPKYNSYKTRKSATEKLFFYSNIMNFFKTKVTLADGTVVVKDDIEVNNDTGEIVWDKKKHFATVRKVLSYPQNNIVKKTEIQTGGFSKESILAHGNSDKLIPRKTKDIYLDPKKYGGFDSPIVAYSVLVVADIKKGKAQKLKTVTELLGITIMERSRFEKNPSAFLESKGYLNIRADKLIILPKYSLFELENGRRRLLASAGELQKGNELALPTQFMKFLYLASRYNESKGKPEEIEKKQEFVNQHVSYFDDILQLINDFSKRVILADANLEKINKLYQDNKENISVDELANNIINLFTFTSLGAPAAFKFFDKIVDRKRYTSTKEVLNSTLIHQSITGLYETRIDLGKLGED

SEQ ID NO: 79 - protein, 1370 aa, Streptococcus agalactiae
MNKPYSIGLDIGTNSVGWSIITDDYKVPAKKMRVLGNTDKEYIKKNLIGALLFDGGNTAADRRLKRTARRRYTRRRNRILYLQEIFAEEMSKVDDSFFHRLEDSFLVEEDKRGSKYPIFATLQEEKDYHEKFSTIYHLRKELADKKEKADLRLIYIALAHIIKFRGHFLIEDDSFDVRNTDISKQYQDFLEIFNTTFENNDLLSQNVDVEAILTDKISKSAKKDRILAQYPNQKSTGIFAEFLKLIVGNQADFKKYFNLEDKTPLQFAKDSYDEDLENLLGQIGDEFADLFSAAKKLYDSVLLSGILTVIDLSTKAPLSASMIQRYDEHREDLKQLKQFVKASLPEKYQEIFADSSKDGYAGYIEGKTNQEAFYKYLSKLLTKQEDSENFLEKIKNEDFLRKQRTFDNGSIPHQVHLTELKAIIRRQSEYYPFLKENQDRIEKILTFRIPYYIGPLAREKSDFAWMTRKTDDSIRPWNFEDLVDKEKSAEAFIHRMTNNDFYLPEEKVLPKHSLIYEKFTVYNELTKVRYKNEQGETYFFDSNIKQEIFDGVFKEHRKVSKKKLLDFLAKEYEEFRIVDVIGLDKENKAFNASLGTYHDLEKILDKDFLDNPDNESILEDIVQTLTLFEDREMIKKRLENYKDLFTESQLKKLYRRHYTGWGRLSAKLINGIRDKESQKTILDYLIDDGRSNRNFMQLINDDGLSFKSIISKAQAGSHSDNLKEVVGELAGSPAIKKGILQSLKIVDELVKVMGYEPEQIVVEMARENQTTNQGRRNSRQRYKLLDDGVKNLASDLNGNILKEYPTDNQALQNERLFLYYLQNGRDMYTGEALDIDNLSQYDIDHIIPQAFIKDDSIDNRVLVSSAKNRGKSDDVPSLEIVKDCKVFWKKLLDAKLMSQRKYDNLTKAERGGLTSDDKARFIQRQLVETRQITKHVARILDERFNNELDSKGRRIRKVKIVTVKSNLVSNFRKEFGFYKIREVNNYHHAHDAYLNAVVAKAILTKYPQLEPEFVYGDYPKYNSYKTRKSATEKLFFYSNIMNFFKTKVTLADGTVVVKDDIEVNNDTGEIVWDKKKHFATVRKVLSYPQNNIVKKTEIQTGGFSKESILAHGNSDKLIPRKTKDIYLDPKKYGGFDSPIVAYSVLVVADIKKGKAQKLKTVTELLGITIMERSRFEKNPSAFLESKGYLNIRADKLIILPKYSLFELENGRRRLLASAGELQKGNELALPTQFMKFLYLASRYNESKGKPEEIEKKQEFVNQHVSYFDDILQLINDFSKRVILADANLEKINKLYQDNKENISVDELANNIINLFTFTSLGAPAAFKFFDKIVDRKRYTSTKEVLNSTLIHQSITGLYETRIDLGKLGED

SEQ ID NO: 80 - protein, 1370 aa, Streptococcus agalactiae
MNKPYSIGLDIGTNSVGWSIITDDYKVPAKKMRVLGNTDKEYIKKNLIGALLFDGGNTAADRRLKRTARRRYTRRRNRILYLQEIFAEEMSKVDDSFFHRLEDSFLVEEDKRGSKYPIFATLQEEKDYHEKFSTIYHLRKELADKKEKADLRLIYIALAHIIKFRGHFLIEDDSFDVRNTDISKQYQDFLEIFNTTFENNDLLSQNVDVEAILTDKISKSAKKDRILAQYPNQKSTGIFAEFLKLIVGNQADFKKYFNLEDKTPLQFAKDSYDEDLENLLGQIGDEFADLFSAAKKLYDSVLLSGILTVIDLSTKAPLSASMIQRYDEHREDLKQLKQFVKASLPEKYQEIFADSSKDGYAGYIEGKTNQEAFYKYLSKLLTKQEDSENFLEKIKNEDFLRKQRTFDNGSIPHQVHLTELKAIIRRQSEYYPFLKENQDRIEKILTFRIPYYIGPLAREKSDFAWMTRKTDDSIRPWNFEDLVDKEKSAEAFIHRMTNNDFYLPEEKVLPKHSLIYEKFTVYNELTKVRYKNEQGETYFFDSNIKQEIFDGVFKEHRKVSKKKLLDFLAKEYEEFRIVDVIGLDKENKAFNASLGTYHDLEKILDKDFLDNPDNESILEDIVQTLTLFEDREMIKKRLENYKDLFTESQLKKLYRRHYTGWGRLSAKLINGIRDKESQKTILDYLIDDGRSNRNFMQLINDDGLSFKSIISKAQAGSHSDNLKEVVGELAGSPAIKKGILQSLKIVDELVKVMGYEPEQIVVEMARENQTTNQGRRNSRQRYKLLDDGVKNLASDLNGNILKEYPTDNQALQNERLFLYYLQNGRDMYTGEALDIDNLSQYDIDHIIPQAFIKDDSIDNRVLVSSAKNRGKSDDVPSLEIVKDCKVFWKKLLDAKLMSQRKYDNLTKAERGGLTSDDKARFIQRQLVETRQITKHVARILDELFNNELDSKGRRIRKVKIVTLKSNLVSNFRKEFGFYKIREVNNYHHAHDAYLNAVVAKAILTKYPQLEPEFVYGDYPKYNSYKTRKSATEKLFFYSNIMNFFKTKVTLADGTVVVKDDIEVNNDTGEIVWDKKKHFATVRKVLSYPQNNIVKKTEIQTGGFSKESILAHGNSDKLIPRKTKDIYLDPKKYGGFDSPIVAYSVLVVADIKKGKAQKLKTVTELLGITIMERSRFEKNPSAFLESKGYLNIRADKLIILPKYSLFELENGRRRLLASAGELQKGNELALPTQFMKFLYLASRYNESKGKPEEIEKKQEFVNQHVSYFDDILQLINDFSKRVILADANLEKINKLYQDNKENISVDELANNIINLFTFTSLGAPAAFKFFDKIVDRKRYTSTKEVLNSTLIHQSITGLYETRIDLGKLGGD

SEQ ID NO: 81 - protein, 1384 aa, Streptococcus agalactiae
MNKPYSIGLDIGTNSVGWSIITDDYKVPAKKMRVLGNTDKEYIKKNLIGALLFDGGNTAADRRLKRTARRRYTRRRNRILYLQEIFAEEMSKVDDSFFHRLEDSFLVEEDKRGSKYPIFATLQEEKDYHEKFSTIYHLRKELADKKEKADLRLIYIALAHIIKFRGHFLIEDDSFDVRNTDISKQYQDFLEIFNTTFENNDLLSQNVDVEAILTDKISKSAKKDRILAQYPNQKSTGIFAEFLKLIVGNQADFKKYFNLEDKTPLQFAKDSYDEDLENLLGQIGDEFADLFSAAKKLYDSVLLSGILTVIDLSTKAPLSASMIQRYDEHREDLKQLKQFVKASLPEKYQEIFADSSKDGYAGYIEGKTNQEAFYKYLSKLLTKQEDSENFLEKIKNEDFLRKQRTFDNGSIPHQVHLTELKAIIRRQSEYYPFLKENQDRIEKILTFRIPYYIGPLAREKSDFAWMTRKTDDSIRPWNFEDLVDKEKSAEAFIHRMTNNDFYLPEEKVLPKHSLIYEKFTVYNELTKVRYKNEQGETYFFDSNIKQEIFDGVFKEHRKVSKKKLLDFLAKEYEEFRIVDVIGLDKENKAFNASLGTYHDLEKILDKDFLDNPDNESILEDIVQTLTLFEDREMIKKRLENYKDLFTESQLKKLYRRHYTGWGRLSAKLINGIRDKESQKTILDYLIDDGRSNRNFMQLINDDGRSNRNFMQLINDDGLSFKSIISKAQAGSHSDNLKEVVGELAGSPAIKKGILQSLKIVDELVKVMGYEPEQIVVEMARENQTTNQGRRNSRQRYKLLDDGVKNLASDLNGNILKEYPTDNQALQNERLFLYYLQNGRDMYTGEALDIDNLSQYDIDHIIPQAFIKDDSIDNRVLVSSAKNRGKSDDVPSLEIVKDCKVFWKKLLDAKLMSQRKYDNLTKAERGGLTSDDKARFIQRQLVETRQITKHVARILDERFNNELDSKGRRIRKVKIVTLKSNLVSNFRKEFGFYKIREVNNYHHAHDAYLNAVVAKAILTKYPQLEPEFVYGDYPKYNSYKTRKSATEKLFFYSNIMNFFKTKVTLADGTVVVKDDIEVNNDTGEIVWDKKKHFATVRKVLSYPQNNIVKKTEIQTGGFSKESILAHGNSDKLIPRKTKDIYLDPKKYGGFDSPIVAYSVLVVADIKKGKAQKLKTVTELLGITIMERSRFEKNPSAFLESKGYLNIRADKLIILPKYSLFELENGRRRLLASAGELQKGNELALPTQFMKFLYLASRYNESKGKPEEIEKKQEFVNQHVSYFDDILQLINDFSKRVILADANLEKINKLYQDNKENISVDELANNIINLFTFTSLGAPAAFKFFDKIVDRKRYTSTKEVLNSTLIHQSITGLYETRIDLGKLGED

SEQ ID NO: 82 - protein, 1370 aa, Streptococcus agalactiae
MNKPYSIGLDIGTNSVGYSVVTDDYKVPAKKMRVLGNTDKEYIKKNLIGALLFDGGNTASDRRLKRTARRRYTRRRNRILYLQEIFAEEMSKVDDSFFHRLEDSFLVEDDKRGSKYPIFATMQEEKDYHEKFPTIYHLRKELADKKEKANLRLVYLALAHIIKFRGHFLIEDDSFDVRNTDIQRQYQAFLEIFDTTFENNHLLSQNIDVEGILTDKISKSAKKDRILAQYPNQKSTGIFAEFLKLIVGNQADFKKHFNLEDKTPLQFAKDSYDEDLENLLGQIGDEFADLFSVAKKLYDSVLLSGILTVTDLSTKAPLSASMIQRYDEHREDLKQLKQFVKASLPEKYQEIFTDSSKDGYAGYIEGKTNQGAFYKYLSKLLTKQEGSEYFLEKIKNEDFLRKQRTFDNGSIPHQVHLTELKAIIRRQSEYYPFLKENLDRIEKILTFRIPYYVGPLAREKSDFAWMTRKTDDSIRPWNFEELVDKEASAEAFIHRMTNNDLYLPEEKVLPKHSLIYEKFTVYNELTKVRYKNEQGETYFFDSNIKQEIFDGVFKEHRKVSKKKLLDFLAKEYEEFRIVDVIGLDKENKAFNASLGTYHDLKKILDKDFLDNPDNESILEDIVQTLTLFEDREMIKKRLENYKDLFTESQLKKLYRRHYTGWGRLSAKLINGIRDKESQKTILDYLISDGRANRNFMQLIHDDGLSFKPIIDKAQAGSHSDNLKEVVGELAGSPAIKKGILQSLKIVDELVKVMGYEPEQVVVEMARENQTTNKGRRNTRQRYKLLEEGVKNLASDLNGNILKEYPTDNQALQNERLFLYYLQNGRDMYTGEALDIDNLSQYDIDHIVPQAFIKDDSIDNRVLVSSAKNRGKSDNVPSIDIVKARKAFWKKLLDAKLMSQRKYDNLTKAERGGLTSDDKARFIQRQLVETRQITKHVARILDERFNNELDSKGRRIRKVKIVTLKSNLVSNFRKEFGFYKIREVNDYHHAHDAYLNAVVAKAILTKYPQLEPEFVYGDYPKYNSYKTRKSATEKLFFYSNIMNFFKTKVTLADGTVVVKDDIEVNNDTGEIVWDKKKHFATVRKVLSYPQVNIVKKTEIQTGGFSKESILAHGNSDKLIPRKTKDIYLDPKKYGGFDSPIVAYSVLVVADIKKGKAQKLKTVTELLGITIMERFRFEKNPSAFLESKGYLNIRDDKLMILPKYSLFELENGRRRLLASAGELQKGNELALPTQYMKFLYLASRYNELKGKPEEIEQKQEFVVQHVSYFDDILQIINDFSNRVILADANLEKINKLYQDNKENISVDELANNIINLFTFTSLGAPAAFKFFDKIVDRKRYTSTKEVLNSTLIHQSITGLYETRIDLGKLGED

SEQ ID NO: 83 - protein, 1370 aa, Streptococcus agalactiae
MNKPYSIGLDIGTNSVGWSIITDDYKVPAKKMRVLGNTDKEYIKKNLIGALLFDGRNTAADRRLKRTARRRYTRRRNRILYLQEIFAEEMSKVDDSFFHRLEDSFLVEEDKRGSKYPIFATLQEEKDYHEKFSTIYHLRKELADKKEKADLRLIYIALAHIIKFRGHFLIEDDSFDVRNTDISKQYQDFLEIFNTTFENNDLLSQNVDVEAILTDKISKSAKKDRILAQYPNQKSTGIFAEFLKLIVGNQADFKKYFNLEDKTPLQFAKDSYDEDLENLLGQIGDEFADLFSAAKKLYDSVLLSGILTVIDLSTKAPLSASMIQRYDEHREDLKQLKQFVKASLPEKYQEIFADSSKDGYAGYIEGKTNQEAFYKYLSKLLTKQEDSENFLEKIKNEDFLRKQRTFDNGSIPHQVHLTELKAIIRRQSEYYPFLKENQDRIEKILTFRIPYYIGPLAREKSDFAWMTRKTDDSIRPWNFEDLVDKEKSAEAFIHRMTNNDFYLPEEKVLPKHSLIYEKFTVYNELTKVRYKNEQGETYFFDSNIKQEIFDGVFKEHRKVSKKKLLDFLAKEYEEFRIVDVIGLDKENKAFNASLGTYHDLEKILDKDFLDNPDNESILEDIVQTLTLFEDREMIKKRLENYKDLFTESQLKKLYRRHYTGWGRLSAKLINGIRDKESQKTILDYLIDDGRSNRNFMQLINDDGLSFKSIISKAQAGSHSDNLKEVVGELAGSPAIKKGILQSLKIVDELVKVMGYEPEQIVVEMARENQTTNQGRRNSRQRYKLLDDGVKNLASDLNGNILKEYPTDNQALQNERLFLYYLQNGRDMYTGEALDIDNLSQYDIDHIIPQAFIKDDSIDNRVLVSSAKNRGKSDDVPSLEIVKDCKVFWKKLLDAKLMSQRKYDNLTKAERGGLTSDDKARFIQRQLVETRQITKHVARILDERFNNELDSKGRRIRKVKIVTLKSNLVSNFRKEFGFYKIREVNNYHHAHDAYLNAVVAKAILTKYPQLEPEFVYGDYPKYNSYKTRKSATEKLFFYSNIMNFFKTKVTLADGTVVVKDDIEVNNDTGEIVWDKKKHFATVRKVLSYPQNNIVKKTEIQTGGFSKESILAHGNSDKLIPRKTKDIYLDPKKYGGFDSPIVAYSVLVVADIKKGKAQKLKTVTELLGITIMERSRFEKNPSAFLESKGYLNIRADKLIILPKYSLFELENGRRRLLASAGELQKGNELALPTQFMKFLYLASRYNESKGKPEEIEKKQEFVNQHVSYFDDILQLINDFSKRVILADANLEKINKLYQDNKENISVDELANNIINLFTFTSLGAPAAFKFFDKIVDRKRYTSTKEVLNSTLIHQSITGLYETRIDLGKLGED

SEQ ID NO: 84 - protein, 1370 aa, Streptococcus agalactiae
MNKPYSIGLDIGTNSVGWSIITDDYKVPAKKMRVLGNTDKEYIKKNLIGALLFDGGNTAADRRLKRTARRRYTRRRNRILYLQEIFAEEMSKVDDSFFHRLEDSFLVEEDKRGSKYPIFATMQEEKYYHEKFPTIYHLRKELADKKEKADLRLIYLALAHIIKFRGHFLIEDDSFDVRNTDIQKQYQAFLEIFDTTFENNDLLSQNVDVEAILTDKISKSAKKDRILARYPNQKSTGIFAEFLKLIVGNQADFKKHFNLEDKTPLQFAKDSYDEDLENLLGQIGDEFADLFSAAKKLYDSVLLSGILTVTDLSTKAPLSASMIQRYDEHREDLKQLKQFVKASLPEKYQEIFADSSKDGYAGYIEGKTNQEAFYKYLSKLLTKQEGSEYLLEKIKNEDFLRKQRTFDNGSIPHQVHLTELRAIIRRQSEYYPFLKENLDRIEKILTFRIPYYVGPLAREKSDFAWMTRKTDDSIRPWNFEDLVDKEKSAEAFIHRMTNNDLYLPEEKVLPKHSLIYEKFTVYNELTKVRFLAEGFKDFQFLNRKQKETIFNSLFKEKRKVTEKDIISFLNKVDGYEGIAIKGIEKQFNASLSTYHDLKKILGKDFLDNTDNELILEDIVQTLTLFEDREMIRKRLDIYKDFFTESQLKKLYRRHYTGWGRLSAKLINGIRNKENQKTILDYLIDDGSANRNFMQLIKDAGLSFKPIIDKARTGSHSDNLKEVVGELAGSPAIKKGILQSLKIVDELVKVMGYEPEQIVVEMARENQTTAKGLSRSRQRLTTLRESLANLKSNILEEKKPKYVKDQVENHHLSDDRLFLYYLQNGKDMYTDDELDIDNLSQYDIDHIIPQAFIKDDSIDNRVLVSSAKNRGKSDDVPSVEIVKDCKVFWKKLLDAKLMSQRKYDNLTKAERGGLTSDDKARFIQRQLVETRQITKHVARILDERFNNELDSKGRRIRKVKIVTLKSNLVSNFRKEFGFYKIREVNNYHHAHDAYLNAVVAKAILTKYPQLEPEFVYGDYPKYNSYKTRKSATEKLFFYSNIMNFFKTKVTLADGTVVVKDDIEVNNDTGEIVWDKKKHFATVRKVLSYPQVNIVKKTEIQTGGFSKESILAHGNSDKLIPRKTKDIYLDPKKYGGFDSPIVAYSVLVVADIKKGKAQKLKTVTELLGITIMERSRFEKNPSAFLESKGYLNIRDDKLMILPKYSLFELENGRRRLLASAGELQKGNELALPTQFMKFLYLASRYNELKGKPEEIEQKQEFVVQHVSYFDDILQIINDFSNRVILADANLEKINKLYQDNKENIPVDELANNIINLFTFTSLGAPAAFKFFDKIVDRKRYTSTKEVLNSTLIHKSITGLYETRIDLGKLGED

SEQ ID NO: 85 - protein, 1370 aa, Streptococcus agalactiae
MNKPYSIGLDIGTNSVGWSIITDDYKVPAKKMRVLGNTDKEYIKKNLIGALLFDGGNTAADRRLKRTARRRYTRRRNRILYLQEIFAEEMSKVDDSFFHRLEDSFLVEEDKRGSKYPIFATLQEEKDYHEKFSTIYHLRKELADKKEKADLRLIYIALAHIIKFRGHFLIEDDSFDVRNTDISKQYQDFLEIFNTTFENNDLLSQNVDVEAILTDKISKSAKKDRILAQYPNQKSTGIFAEFLKLIVGNQADFKKYFNLEDKTPLQFAKDSYDEDLENLLGQIGDEFADLFSAAKKLYDSVLLSGILTVIDLSTKAPLSASMIQRYDEHREDLKQLKQFVKASLPEKYQEIFADSSKDGYAGYIEGKTNQEAFYKYLSKLLTKQEDSENFLEKIKNEDFLRKQRTFDNGSIPHQVHLTELKAIIRRQSEYYPFLKENQDRIEKILTFRIPYYIGPLAREKSDFAWMTRKTDDSIRPWNFEDLVDKEKSAEAFIHRMTNNDFYLPEEKVLPKHSLIYEKFTVYNELTKVRYKNEQGETYFFDSNIKQEIFDGVFKEHRKVSKKKLLDFLAKEYEEFRIVDVIGLDKENKAFNASLGTYHDLEKILDKDFLDNPDNESILEDIVQTLTLFEDREMIKKRLENYKDLFTESQLKKLYRRHYTGWGRLSAKLINGIRDKESQKTILDYLIDDGRSNRNFMQLINDDGLSFKSIISKAQAGSHSDNLKEVVGELAGSPAIKKGILQSLKIVDELVKVMGYEPEQIVVEMARENQTTNQGRRNSRQRYKLLDDGVKNLASDLNGNILKEYPTDNQALQNERLFLYYLQNGRDMYTGEALDIDNLSQYDIDHIIPQAFIKDDSIDNRVLVSSAKNRGKSDDVPSLEIVKDCKVFWKKLLDAKLMSQRKYDNLTKAERGGLTSDDKARFIQRQLVETRQITKHVARILDERFNNELDSKGRRIRKVKIVTLKSNLVSNFRKEFGFYKIREVNNYHHAHDAYLNAVVAKAILTKYPQLEPEFVYGDYPKYNSYKTRKSATEKLFFYSNIMNFFKTKVTLADGTVVIKDDIEVNNDTGEIVWDKKKHFATVRKVLSYPQNNIVKKTEIQTGGFSKESILAHGNSDKLIPRKTKDIYLDPKKYGGFDSPIVAYSVLVVADIKKGKAQKLKTVTELLGITIMERSRFEKNPSAFLESKGYLNIRADKLIILPKYSLFELENGRRRLLASAGELQKGNELALPTQFMKFLYLASRYNESKGKPEEIEKKQEFVNQHVSYFDDILQLINDFSKRVILADANLEKINKLYQDNKENISVDELANNIINLFTFTSLGAPAAFKFFDKIVDRKRYTSTKEVLNSTLIHQSITGLYETRIDLGKLGED

SEQ ID NO: 86 - protein, 1370 aa, Streptococcus agalactiae
MNKPYSIGLDIGTNSVGWSIITDDYKVPAKKMRVLGNTDKEYIKKNLIGALLFDGGNTAADRRLKRTARRRYTRRRNRILYLQEIFAEEMSKVDDSFFHRLEDSFLVEEDKRGSKYPIFATLQEEKDYHEKFSTIYHLRKELADKKEKADLRLIYIALAHIIKFRGHFLIEDDSFDVRNTDISKQYQDFLEIFNTTFENNDLLSQNVDVEAILTDKISKSAKKDRILAQYPNQKSTGIFAEFLKLIVGNQADFKKYFNLEDKTPLQFAKDSYDEDLENLLGQIGDEFADLFSAAKKLYDSVLLSGILTVIDLSTKAPLSASMIQRYDEHREDLKQLKQFVKASLPEKYQEIFADSSKDGYAGYIEGKTNQEAFYKYLSKLLTKQEDSENFLEKIKNEDFLRKQRTFDNGSIPHQVHLTELKAIIRRQSEYYPFLKENQDRIEKILTFRIPYYIGPLAREKSDFAWMTRKTDDSIRPWNFEDLVDKEKSAEAFIHRMTNNDFYLPEEKVLPKHSLIYEKFTVYNELTKVRYKNEQGETYFFDSNIKQEIFDGVFKEHRKVSKKKLLDFLAKEYEEFRIVDVIGLDKENKAFNASLGTYHDLEKILDKDFLDNPDNESILEDIVQTLTLFEDREMIKKRLENYKDLFTESQLKKLYRRHYTGWGRLSAKLINGIRDKESQKTILDYLIDDGRSNRNFMQLINDDGLSFKSIISKAQAGSHSDNLKEVVGELAGSPAIKKGILQSLKIVDELVKVMGYEPEQIVVEMARENQTTNQGRRNSRQRYKLLDDGVKNLASDLNGNILKEYPTDNQALQNERLFLYYLQNGRDMYTGEALDIDNLSQYDIDHIIPQAFIKDDSIDNRVLVSSAKNRGKSDDVPSLEIVKDCKVFWKKLLDAKLMSQRKYDNLTKAERGGLTSDDKARFIQRQLVETRQITKHVASILDERFNNELDSKGRRIRKVKIVTLKSNLVSNFRKEFGFYKIREVNNYHHAHDAYLNAVVAKAILTKYPQLEPEFVYGDYPKYNSYKTRKSATEKLFFYSNIMNFFKTKVTLADGTVVVKDDIEVNNDTGEIVWDKKKHFATVRKVLSYPQNNIVKKTEIQTGGFSKESILAHGNSDKLIPRKTKDIYLDPKKYGGFDSPIVAYSVLVVADIKKGKAQKLKTVTELLGITIMERSRFEKNPSAFLESKGYLNIRADKLIILPKYSLFELENGRRRLLASAGELQKGNELALPTQFMKFLYLASRYNESKGKPEEIEKKQEFVNQHVSYFDDILQLINDFSKRVILADANLEKINKLYQDNKENISVDELANNIINLFTFTSLGAPAAFKFFDKIVDRKRYTSTKEVLNSTLIHQSITGLYETRIDLGKLGED

SEQ ID NO: 87 - protein, 1370 aa, Streptococcus agalactiae
MNKPYSIGLDIGTNSVGYSVVTDDYKVPAKKMRVLGNTDKEYIKKNLIGALLFDGGNTASDRRLKRTARRRYTRRRNRILYLQEIFAEEMSKVDDSFFHRLEDSFLVEDDKRGSKYPIFATMQEEKDYHEKFPTIYHLRKELADKKEKANLRLVYLALAHIIKFRGHFLIEDDSFDVRNTDIQRQYQAFLEIFDTTFENNHLLSQNIDVEGILTDKISKSAKKDRILAQYPNQKSTGIFAEFLKLIVGNQADFKKHFNLEDKTPLQFAKDSYDEDLENLLGQIGDEFADLFSVAKKLYDSVLLSGILTVTDLSTKAPLSASMIQRYDEHREDLKQLKQFVKASLPEKYQEIFTDSSKDGYAGYIESKTNQGAFYKYLSKLLTKQEGSEYFLEKIKNEDFLRKQRTFDNGSIPHQVHLTELKAIIRRQSEYYPFLKENLDRIEKILTFRIPYYVGPLAREKSDFAWMTRKTDDSIRPWNFEELVDKEASAEAFIHRMTNNDLYLPEEKVLPKHSLIYEKFTVYNELTKVRYKNEQGETYFFDSNIKQEIFDGVFKEHRKVSKKKLLDFLAKEYEEFRIVDVIGLDKENKAFNASLGTYHDLKKILDKDFLDNPDNESILEDIVQTLTLFEDREMIKKRLENYKDLFTESQLKKLYRRHYTGWGRLSAKLINGIRDKESQKTILDYLISDGRANRNFMQLIHDDGLSFKPIIDKAQAGSHSDNLKEVVGELAGSPAIKKGILQSLKIVDELVKVMGYEPEQVVVEMARENQTTNQGRRNTRQRYKLLEEGVKNLASDLNGNILKEYPTDNQALQNERLFLYYLQNGRDMYTGEALDIDNLSQYDIDHIVPQAFIKDDSIDNRVLVSSAKNRGKSDNVPSIDIVKARKAFWKKLLDAKLMSQRKYDNLTKAERGGLTSDDKARFIQRQLVETRQITKHVARILDERFNNELDSKGRRIRKVKIVTLKSNLVSNFRKEFGFYKIREVNDYHHAHDAYLNAVVAKAILTKYPQLEPEFVYGDYPKYNSYKTRKSATEKLFFYSNIMNFFKTKVTLADGTVVVKDDIEVNNDTGEIVWDKKKHFATVRKVLSYPQVNIVKKTEIQTGGFSKESILAHGNSDKLIPRKTKDIYLDPKKYGGFDSPIVAYSVLVVADIKKGKAQKLKTVTELLGITIMERFRFEKNPSAFLESKGYLNIRDDKLMILPKYSLFELENGRRRLLASAGELQKGNELALPTQYMKFLYLASRYNELKGKPEEIEQKQEFVVQHVSYFDDILQIINDFSNRVILADANLEKINKLYQDNKENISVDELANNIINLFTFTSLGAPAAFKFFDKIVDRKRYTSTKEVLNSTLIHQSITGLYETRIDLGKLGED

SEQ ID NO: 88 - protein, 1370 aa, Streptococcus agalactiae
MNKPYSIGLDIGTNSVGWSIITDDYKVPAKKMRVLGNTDKEYIKKNLIGALLFDGGNTAADRRLKRTARRRYTRRRNRILYLQEIFAEEMSKVDDSFFHRLEDSFLVEEDKRGSKYPIFATLQEEKDYHEKFSTIYHLRKELADKKEKADLRLIYIALAHIIKFRGHFLIEDDSFDVRNTDISKQYQDFLEIFNTTFENNDLLSQNVDVEAILTDKISKSAKKDRILAQYPNQKSTGIFAEFLKLIVGNQADFKKYFNLEDKTPLQFAKDSYDEDLENLLGQIGDEFADLFSAAKKLYDSVLLSGILTVIDLSTKAPLSASMIQRYDEHREDLKQLKQFVKASLPEKYQEIFADSSKDGYAGYIEGKTNQEAFYKYLSKLLTKQEDSENFLEKIKNEDFLRKQRTFDNGSIPHQVHLTELKAIIRRQSEYYPFLKENQDRIEKILTFRIPYYIGPLAREKSDFAWMTRKTDDSIRPWNFEDLVDKEKSAEAFIHRMTNNDFYLPEEKVLPKHSLIYEKFTVYNELTKVRYKNEQGETYFFDSNIKQEIFDGVFKEHRKVSKKKLLDFLAKEYEEFRIVDVIGLDKENKAFNASLGTYHDLEKILDKDFLDNPDNESILEDIVQTLTLFEDREMIKKRLENYKDLFTESQLKKLYRRHYTGWGRLSAKLINGIRDKESQKTILDYLIDDGRSNRNFMQLINDDGLSFKSIISKAQAGSHSDNLKEVVGELAGSPAIKKGILQSLKIVDELVKVMGYEPEQIVVEMARENQTTNQGRRNSRQRYKLLDDGVKNLASDLNGNILKEYPTDNQALQNERLFLYYLQNGRDMYTGEALDIDNLSQYDIDHIIPQAFIKDDSIDNRVLVSSAKNRGKSDDVPSLEIVKDCKVFWKKLLDAKLMSQRKYDNLTKAERGGLTSDDKARFIQRQLVETRQITKHVARILDERFNNELDSKGRRIRKVKIVTLKSNLVSNFRKEFGFYKIREVNNYHHAHDAYLNAVVAKAILTKYPQLEPEFVYGDYPKYNSYKTRKSATEKLFFYSNIMNFFKTKVTLADGTVVVKDDIEVNNDTGEIVWDKKKHFATVRKVLSYPQNNIVKKTEIQTGGFSKESILAHGNSDKLIPRKTKDIYLDPKKYGGFDSPIVAYSVLVVADIKKGKAQKLKTVTELLGITIMERSRFEKNLSAFLESKGYLNIRADKLIILPKYSLFELENGRRRLLASAGELQKGNELALPTQFMKFLYLASRYNESKGKPEEIEKKQEFVNQHVSYFDDILQLINDFSKRVILADANLEKINKLYQDNKENISVDELANNIINLFTFTSLGAPAAFKFFDKIIDRKRYTSTKEVLNSTLIHQSITGLYETRIDLGKLGED

SEQ ID NO: 89 - protein, 1370 aa, Streptococcus agalactiae
MNKPYSIGLDIGTNSVGWSIITDDYKVPAKKMRVLGNTDKEYIKKNLIGALLFDGGNTAADRRLKRTARRRYTRRRNRILYLQEIFAEEMSKVDDSFFHRLEDSFLVEEDKRGSKYPIFATLQEEKDYHEKFSTIYHLRKELADKKEKADLRLIYIALAHIIKFRGHFLIEDDSFDVRNTDISKQYQDFLEIFNTTFENNDLLSQNVDVEAILTDKISKSAKKDRILAQYPNQKSTGIFAEFLKLIVGNQADFKKYFNLEDKTPLQFAKDSYDEDLENLLGQIGDEFADLFSAAKKLYDSVLLSGILTVIDLSTKAPLSASMIQRYDEHREDLKQLKQFVKASLPEKYQEIFADSSKDGYAGYIEGKTNQEAFYKYLSKLLTKQEDSENFLEKIKNEDFLRKQRTFDNGSIPHQVHLTELKDIIRRQSEYYPFLKENQDRIEKILTFRIPYYIGPLAREKSDFAWMTRKTDDSIRPWNFEDLVDKEKSAEAFIHRMTNNDFYLPEEKVLPKHSLIYEKFTVYNELTKVRYKNEQGETYFFDSNIKQEIFDGVFKEHRKVSKKKLLDFLAKEYEEFRIVDVIGLDKENKAFNASLGTYHDLEKILDKDFLDNPDNESILEDIVQTLTLFEDREMIKKRLENYKDLFTESQLKKLYRRHYTGWGRLSAKLINGIRDKESQKTILDYLIDDGRSNRNFMQLINDDGLSFKSIISKAQAGSHSDNLKEVVGELAGSPAIKKGILQSLKIVDELVKVMGYEPEQIVVEMARENQTTNQGRRNSRQRYKLLDDGVKNLASDLNGNILKEYPTDNQALQNERLFLYYLQNGRDMYTGEALDIDNLSQYDIDHIIPQAFIKDDSIDNRVLVSSAKNRGKSDDVPSLEIVKDCKVFWKKLLDAKLMSQRKYDNLTKAERGGLTSDDKARFIQRQLVETRQITKHVARILDERFNNELDSKGRRIRKVKIVTLKSNLVSNFRKEFGFYKIREVNNYHHAHDAYLNAVVAKAILTKYPQLEPEFVYGDYPKYNSYKTRKSATEKLFFYSNIMNFFKTKVTLADGTVVVKDDIEVNNDTGEIVWDKKKHFATVRKVLSYPQNNIVKKTEIQTGGFSKESILAHGNSDKLIPRKTKDIYLDPKKYGGFDSPIVAYSVLVVADIKKGKAQKLKTVTELLGITIMERSRFEKNPSAFLESKGYLNIRADKLIILPKYSLFELENGRRRLLASAGELQKGNELALPTQFMKFLYLASRYNESKGKPEEIEKKQEFVNQHVSYFDDILQLINDFSKRVILADANLEKINKLYQDNKENISVDELANNIINLFTFTSLGAPAAFKFFDKIVDRKRYTSTKEVLNSTLIHQSITGLYETRIDLGKLGED

SEQ ID NO: 90 - protein, 1370 aa, Streptococcus agalactiae 138P
MNKPYSIGLDIGTNSVGWSIITDDYKVPAKKMRVLGNTDKEYIKKNLIGALLFDGGNTAADRRLKRTARRRYTRRRNRILYLQEIFAEEMSKVDDSFFHRLEDSFLVEEDKRGSKYPIFATMQEEKDYHEKFPTIYHLRKELADKKEKADLRLVYLALAHIIKFRGHFLIEDDRFDVRNTDIQKQYQAFLEIFDTSFENNHLLSQNVDVEAILTDKISKSAKKDRILAQYPNQKSTGIFAEFLKLIVGNQADFKKHFNLEDKTPLQFAKDSYDEDLENLLGQIGDEFADLFSAAKKLYDSVLLSGILTVTDLSTKAPLSASMIQRYDEHREDLKQLKQFVKASLPEKYQEIFADSSKDGYAGYIEGKTNQEAFYKYLSKLLTKQEDSEYFLEKIKNEDFLRKQRTFDNGSIPHQVHLTELKAIIRRQSEYYPFLKENQDKIEKILTFRIPYYVGPLARGNSDFAWMTRKTDDSIRPWNFEDLVDKEKSAEAFIHRMTNNDLYLPEEKVLPKHSLIYEKFTVYNELTKVRYKNEQGETYFFDSNVKQEIFDGVFKEHRKVSKKQLLDFLAKEFEEFRIVDVTGLDKENKAFNASLGTYHDLKKILDKDFLDNPDNESILEDIVQTITLFEDREMIKKRLENYKDLFTESQLKKLYRRHYTGWGRLSAKLINGIRDRESQKIILDYLISDGRANRNFMQLINDDGLSFKSIISKAQSGSHSDNLKEVVGELAGSPAIKKGILQSLKIVDELVKVMGYEPEQIVVEMARENQTTNQGRRNSRQRYKLLEDGVKNLASDLNGDILKEYPTDNQALQNERLFLYYLQNGRDMYTGEALDIDSLSQYDIDHIVPQAFIKDDSIDNRVLVSSAKNRGKSDDVPSIDIVKARKAFWKKLLDAKLISQRKYDNLTKAERGGLTPDDKAGFIQRQLVETRQITKHVARILDERFNNKVDDNNKPIRKVKIVTLKSNLVSNFRKEFGFYKIREVNNYHHAHDAYLNAVVAKAILTKYPQLEPEFVYGDYPKYNSYKTRKSATEKLFFYSNIMNFFKTKVTLADETVVVKDDIEVNNETGEIAWDKKKHFATVRKVLSYPQVNIVKKTEVQTGGFSKESILAHSNSDKLIPRKTKDIYLDPKKYGGFDSPIVAYSVLVLADIKKGKAQKLKTVKELIGITIMERERFEKNPSAFLESKGYLNIRTDKLIILPKYSLFELENGRRRLLASAGELQKGNELALPTQYMKFLYLASRYNESKGKPEEIEKKQEFVNQHVSYFDDILQLINDFSKRVILADANLEKINKLYSDNKDNTPVDELAKNIINLFTFTSLGAPAAFKFFDKSVDRKRYTSTKEVLDSTLIHQSITGLYETRIDLGKLGED

SEQ ID NO: 91 - protein, 1370 aa, Streptococcus agalactiae H36B
  misc_feature (9)..(9): Xaa can be any naturally occurring amino acid
MNKPYSIGXDIGTNSVGWSIITDDYKVPAKKMRVLGNTDKEYIKKNLIGALLFDGGNTAADRRLKRTARRRYTRRRNRILYLQEIFAEEMSKVDDSFFHRLEDSFLVEEDKRGSKYPIFATLQEEKDYHEKFSTIYHLRKELADKKEKADLRLIYIALAHIIKFRGHFLIEDDSFDVRNTDISKQYQDFLEIFNTTFENNDLLSQNVDVEAILTDKISKSAKKDRILAQYPNQKSTGIFAEFLKLIVGNQADFKKYFNLEDKTPLQFAKDSYDEDLENLLGQIGDEFADLFSAAKKLYDSVLLSGILTVIDLSTKAPLSASMIQRYDEHREDLKQLKQFVKASLPEKYQEIFADSSKDGYAGYIEGKTNQEAFYKYLSKLLTKQEDSENFLEKIKNEDFLRKQRTFDNGSIPHQVHLTELKAIIRRQSEYYPFLKENQDRIEKILTFRIPYYIGPLAREKSDFAWMTRKTDDSIRPWNFEDLVDKEKSAEAFIHRMTNNDFYLPEEKVLPKHSLIYEKFTVYNELTKVRYKNEQGETYFFDSNIKQEIFDGVFKEHRKVSKKKLLDFLAKEYEEFRIVDVIGLDKENKAFNASLGTYHDLEKILDKDFLDNPDNESILEDIVQTLTLFEDREMIKKRLENYKDLFTESQLKKLYRRHYTGWGRLSAKLINGIRDKESQKTILDYLIDDGRSNRNFMQLINDDGLSFKSIISKAQAGSHSDNLKEVVGELAGSPAIKKGILQSLKIVDELVKVMGYEPEQIVVEMARENQTTNQGRRNSRQRYKLLDDGVKNLASDLNGNILKEYPTDNQALQNERLFLYYLQNGRDMYTGEALDIDNLSQYDIDHIIPQAFIKDDSIDNRVLVSSAKNRGKSDDVPSLEIVKDCKVFWKKLLDAKLMSQRKYDNLTKAERGGLTSDDKARFIQRQLVETRQITKHVARILDERFNNELDSKGRRIRKVKIVTLKSNLVSNFRKEFGFYKIREVNNYHHAHDAYLNAVVAKAILTKYPQLEPEFVYGDYPKYNSYKTRKSATEKLFFYSNIMNFFKTKVTLADGTVVVKDDIEVNNDTGEIVWDKKKHFATVRKVLSYPQNNIVKKTEIQTGGFSKESILAHGNSDKLIPRKTKDIYLDPKKYGGFDSPIVAYSVLVVADIKKGKAQKLKTVTELLGITIMERSRFEKNPSAFLESKGYLNIRADKLIILPKYSLFELENGRRRLLASAGELQKGNELALPTQFMKFLYLASRYNESKGKPEEIEKKQEFVNQHVSYFDDILQLINDFSKRVILADANLEKINKLYQDNKENISVDELANNIINLFTFTSLGAPAAFKFFDKIVDRKRYTSTKEVLNSTLIHQSITGLYETRIDLGKLGED

SEQ ID NO: 92 - protein, 1370 aa, Streptococcus agalactiae ILRI112
MNKPYSIGLDIGTNSVGWSIITDDYKVPAKKMRVLGNTDKEYIKKNLIGALLFDGGNTAADRRLKRIARRRYTRRRNRILYLQEIFAEKMSKVDDSFFHRLEDSFLVEEDKRGSKYPIFATLQEEKDYHEKFPTIYHLRKELADKKEKADLRLVYLALAHIIKFRGHFLIEDDRFDVRNTDIQKQYQAFLEIFDTTFENNHLLSQNVDVEAILTDKISKSAKKDRILAQYPDQKSTGIFAEFLKLIVGNQADFKKHFNLEDKTPLQFAKDSYDEDLENLLGQIGDEFADLFSAAKKLYDSVLLSGILTVTDLSTKAPLSASMIQRYDEHREDLKQLKQFVKASLPEKYQEIFADSSKDGYAGYIEGKTNQEAFYKYLSKLLTKQEGSEYLLEKIKNEDFLRKQRTFDNGSIPHQVHLTELRAIIRRQSEYYPFLKENLDRIEKILTFRIPYYVGPLAREKSDFAWMTRKTDDSIRPWNFEELVDKEASAEAFIHCMTNNDLYLPEEKVLPKHSLIYEKFTVYNELTKVRYKNEQGETYFFDSNIKQEIFDGVFKEYRKVSKKQLLDFLAKEFEEFRIVDVTGLDKENKAFNASLGTYHDLEKILGKDFLDNPDNESILEDIVQTLTLFEDREMIKKRLDIYKDFFTESQLKKLYRRHYTGWGRLSAKLINGIRNKENQKTILDYLIDDGSANRNFMQLIKDAGLSFKSIISKAQSGSHSDNLKEVVSELAGSPAIKKGILQSLKIVDELVKVMGYKPEQIVVEMARENQTTNQGRRNSRQRYKLLDDGVRNLASDLNGNILKEYPTDNQALQNERLFLYYLQNGRDMYTEKALDIDNLSQYDIDHIIPQAFIKDDSIDNRVLVSSAKNRGKSDDVPSLEIVKDCKVFWKKLLDAKLMSQRKYDNLTKAERGGLTSDDKARFIQRQLVETRQITKHVARILDERFNNELDSKGRRIRKVKIVTLKSNLVSNFRKEFGFYKIREVNDYHHAHDAYLNAVVAKAILTKYPQLEPEFVYGDYPKYNSYKTRKSATEKLFFYSNIMNFFKTKVTLADGTVVVKDDIEVNNDTGEIVWDKKKHFATVRKVLSYPQNNIVKKTEIQTGGFSKESILAHGNSDKLIPRKTKDIYLDPKKYGGFDSPIVAYSVLVVADIKKGKAQKLKTVTELLGITIMERSRFEKNPSAFLESKGYLNIRTDKLIILPKYSLFELENGRRRLLASAGELQKGNELALPTQFMKFLYLASRYNESKGKPEEIEKKQEFVNQHVSYFDDILQIINDFSNRVILADANLEKINKLYQDNKENISVDELANNIINLFTFTSLGAPAAFKFFDKIVDRKRYTSTKEVLNSTLIHQSITGLYETRIDLGKLGED

SEQ ID NO: 93 - protein, 1386 aa, Streptococcus anginosus
MNQKYSIGLDIGTNSVGWAVITDDYKVPAKKMKVLGNTDKQSIKKNLLGALLFDSGETAEATRLKRTARRRYTRRRNRLRYLQEIFAEEMMQVDESFFQRLDDSFLVDEDKRGERHPIFGNIAAEVKYHDEFPTIYHLRKHLADISQKADLRLVYLALAHMIKFRGHFLIEGQLKAENTNVQALFKDFVEVYDKTVEESHLSEITVDALSILTEKVSKSRRLENLIAHYPAEKKNTLFGNLIALFLGLQPNFKTNFQLSEDAKLQFSKDTYEEDLEGLLGEVGDEYADLFASAKNLYDAILLSGILTVDDNSTKAPLSASMVKRYEEHQKDLKKFEDFIKVNALDQYNAIFKDKNKKGYAGYIESGVKQDEFYKYLKGILLQINGSGDFLDKIDREDFLRKQRTFDNGSIPHQIHLQEMHAILRRQGEHYPFLKENQDKIEKILTFRIPYYVGPLARKGSRFAWAEYKADEKITPWNFDDILDKEKSAEKFITRMTLNDLYLPEEKVLPKHSLLYETFTVYNELTKVKYVNEQGEAKFFDANMKQEIFDHVFKENRKVTKDKLLNYLNKEFEEFRIVNLTGLDKENKVFNSSLGTYHDLRKILNKSFLDNKENAQIIEDIIQTLTLFEDREMIRQRLQKYSDIFTKAQLKKLERRHYTGWGRLSYKLINGIRNKENKKTILDYLIDDGYANRNFMQLINDDALSFKEEIAKAQIIGDVDDIANVVHDLPGSPAIKKGILQSVKIVDELVKVMGHNPANIIIEMARENQTTDRGRRNSQQRLKLLQDSLKNLDNPVNIKNVENQQLQNDRLFLYYIQNGKDMYTGETLDINNLSQYDIDHIIPQAYIKDDSFDNRVLTSSSENRGKSDNVPSIEVVCARKADWMRLRKAGLISQRKFDNLTKAERGGLTENDKAGFIKRQLVETRQITKHVAQVLDARFNAKHDENKKVIRDVKIITLKSNLVSQFRKDFKFYKVREINDYHHAHDAYLNAVIGTALLKKYPKLASEFVYGEFKKYDVRKFIAKSDKEIGKATAKYFFYSNLMNFFKKEVKFADGTVVERPDIETSEDGEIAWNKQTDFKIVRKVLSYPQVNIVKKTEVQTHGLDRGKPRGLFNANPSPKPKPDSSENLVGVKRNLDPKKYGGYAGISNSYAVLVKAIIEKGVKKKETMVLEFQGISILDRITFEKDKRAFLLGKGYKDIKKIIELPKYSLFELKDGSRRMLASILSTNNKRGEIHKGNELFVPQKFTTLLYHAKRINNPINKDHIEYVKKHRDDFKELLNYVLEFNEKYVGATKNGERLKEAVADFDSKSNEEICTSFLGAVNSKNAGLFELTSLGSASDFEFLGVKIPRYRDYTPSSLLKDSTLIHQSITGLYETRIDLSKLGED

SEQ ID NO: 94 - protein, 1346 aa, Streptococcus anginosus
MMKKEYSIGLDIGTNSVGWAVITDDYKVPAKKMKVLGNTDKQSIKKNLLGALLFDSGETAEATRLKRTARRRYTRRKNRLRYLQEIFTEEMNKVDENFFQRLDDSFLVEEDKQGSKYPIFGTLKEEKEYHKKFKTIYHLREELANSKEKADLRLVYLALAHMIKFRGHFLYEGDLKAENTDVQALFKDFVEEYDKTIEESHLSEITVDALSILTEKVSKSSRLENLIAHYPTEKKNTLFGNLIALSLGLQPNFKTNFQLSEDAKLQFSKDTYEEDLEELLGEIGDEYADLFASAKNLYDAILLSGILAVDDNTTKAPLSASMVKRYEEHQKDLKKLKDFIKVNAPDQYNAIFKDKNKKGYAGYIESGVEQDEFYKYLKGILLKINGSGDFLDKIDCEDFLRKQRTFDNGSIPHQIHLQEMHAILRRQGEHYPFLKENQDKIEKILTFRIPYYVGPLARKGSRFAWAEYKADEKITPWNFDDILDKEKSAEKFITRMTLNDLYLPEEKVLPKHSPLYETFTVYNELTKVKYVNEQGEAKFFDTNMKQEIFDHVFKENRKVTKDKLLNYLNKEFEEFRIVNLTGLDKENKAFNSSLGTYHDLRKILDKSFLDDKANEKTIEDIIQTLTLFEDREMIRQRLQKYSDIFTKAQLKKLERRHYTGWGRLSYKLINGIRNKENKKTILDYLIDDGYANRNFMQLINDDALSFKEEIARAQIIGDVDDIANVVHDLPGSPAIKKGILQSVKIVDELVKVMGHNPANIIIEMARENQTTDKGRRNSQQRLKLLQDSLKNLDNPVNIKNVENQQLQNDRLFLYYIQNGKDMYTGETLDINNLSQYDIDHIIPQAFIKDNSLDNRVLTRSDKNRGKSDDVPSIEVVHEMKSFWSKLLSVKLITQRKFDNLTKAERGGLTEEDKAGFIKRQLVETRQITKHVAQILDERFNTEFDGAQRRIRNVKIITLKSNLVSNFRKEFELYKVREINDYHHAHDAYLNAVVGNALLLKYPQLEPEFVYGEYPKYNSYRSRKSATEKFLFYSNILRFFKKEDIQTNEDGEIAWNKEKHIKILRKVLSYPQVNIVKKTEEQTGGFSKESILPKGESDKLIPRKTKNSYWNPKKYGGFDSPVVAYSILVFADVEKGKSKKLRKVQDMVGITIMEKKRFEKNPVDFLEQRGYRNVRLEKIIKLPKYSLFELENKRRRLLASARELQKGNELVIPQRFTTLLYHSYQIEKNYEPEHREYVEKHKDEFKELLEYISVFSRKYVLADNNLTKIEMLFSKNKDAEVSSLAKSFISLLTFTAFGAPAAFNFFGENIDRKRYTSVTECLNATLIHQSITGLYETRIDLSKLGED

SEQ ID NO: 95 - protein, 1346 aa, Streptococcus anginosus
MMKKEYSIGLDIGTNSVGWAVITDDYKVPAKKMKVLGNTDKQSIKKNLLGALLFDSGETAEATRLKRTARRRYTRRRNRLRYLQEIFAEEMMQVDESFFQRLDDSFLVEEDKRGSRYPIFGNIAAEVKYHDDFPTIYHLRKHLVDISQKADLRLVYLALAHMIKFRGHFLIEGQLKAENTNVQALFKDFVEVYDKTVEESHLSEMTVDALSILTEKVSKSRRLENLVECYPTEKKNTLFGNLIALSLGLQPNFKTNFQLSEDAKLQFSKDTYEEDLEGLLGEIGDEYADLFASAKNLYDAILLSGILAVDDNTTKAPLSASMVKRYEEHQKDLKKLKDFIKVNAPAQYDDIFKDETKNGYAGYIENGVKQDEFYKYLKNTLSKIDGSDYFLDKIDREDFLRKQRTFDNGSIPHQIHLQEMHAILRRQGEHYPFLKENQDKIEKILTFRIPYYVGPLARKGSRFAWAEYKADEKITPWNFDDILDKEKSAEKFITRMTLNDLYLPEEKVLPKHSPLYETFTVYNELTKVKYVNEQGEAKFFDTNMKQEIFDHVFKENRKVTKDKLLNYLNKEFEEFRIVNLTGLDKENKAFNASLGTYHDLRKILDKSFLDDKVNEKIIEDIIQTLTLFEDREMIRQRLQKYSDIFTTQQLKKLERRHYTGWGRLSYKLINGIRNKENKKTILDYLIDDGYANRNFMQLINDDALSFKEEIARAQIIGDVDDIANVVHDLPGSPAIKKGILQSVKIVDELVKVMGHNPANIIIEMARENQTTDKGRRNSQQRLKLLQDSLKNLDNPVNIKNVENQQLQNDRLFLYYIQNGKDMYTGETLDINNLSQYDIDHIIPQAFIKDNSLDNRVLTRSDKNRGKSDDVPSIEVVHEMKSFWSKLLSVKLITQRKFDNLTKAERGGLTEEDKAGFIKRQLVETRQITKHVAQILDERFNTEFDGAQRRIRNVKIITLKSNLVSNFRKEFELYKVREINDYHHAHDAYLNAVVGNALLLKYPQLEPEFVYGEYPKYNSYRSRKSATEKFLFYSNILRFFKKEDIQTNEDGEIAWNKEKHIKILRKVLSYPQVNIVKKTEEQTGGFSKESILPKGESDKLIPRKTKNSYWNPKKYGGFDSPVVAYSILVFADVEKGKSKKLRKVQDMVGITIMEKKRFEKHPVDFLEQRGYRNVRLEKIIKLPKYSLFELENKRRRLLASARELQKGNELVIPQRFTTLLYHSYRIEKDYEPEHREYVEKHKDEFKELLEYISVFSRKYVLADNNLTKIEMLFSKNKDAEVSSLAKSFISLLTFTAFGAPAAFNFFGENIDRKRYTSVTECLNATLIHQSITGLYETRIDLSKLGED

SEQ ID NO: 96 - protein, 1345 aa, Streptococcus anginosus T5
MKKEYSIGLDIGTNSVGWAVITDDYKVPAKKMKVLGNTDKQSIKKNLLGALLFDSGETAEATRLKRTARRRYTRRKNRLRYLQEIFTEEMNKVDENFFQRLDDSFLVEEDKQGSKYPIFGTLKEEKEYHKKFKTIYHLREELANSKEKADLRLVYLALAHMIKFRGHFLYEGDLKAENTDVQALFKDFVEEYDKTIEESHLSEITVDALSILTEKVSKSSRLENLIAHYPTEKKNTLFGNLIALSLGLQPNFKTNFQLSEDAKLQFSKDTYEEDLEELLGEIGDEYADLFASAKNLYDAILLSGILAVDDNTTKAPLSASMVKRYEEHQKDLKKLKDFIKVNAPDQYNAIFKDKNKKGYAGYIESGVEQDEFYKYLKGILLKINGSGDFLDKIDCEDFLRKQRTFDNGSIPHQIHLQEMHAILRRQGEHYPFLKENQDKIEKILTFRIPYYVGPLARKGSRFAWAEYKADEKITPWNFDDILDKEKSAEKFITRMTLNDLYLPEEKVLPKHSPLYETFTVYNELTKVKYVNEQGEAKFFDTNMKQEIFDHVFKENRKVTKDKLLNYLNKEFEEFRIVNLTGLDKENKAFNSSLGTYHDLRKILDKSFLDDKANEKTIEDIIQTLTLFEDREMIRQRLQKYSDIFTKAQLKKLERRHYTGWGRLSYKLINGIRNKENKKTILDYLIDDGYANRNFMQLINDDALSFKEEIARAQIIGDVDDIANVVHDLPGSPAIKKGILQSVKIVDELVKVMGHNPANIIIEMARENQTTDKGRRNSQQRLKLLQDSLKNLDNPVNIKNVENQQLQNDRLFLYYIQNGKDMYTGETLDINNLSQYDIDHIIPQAFIKDNSLDNRVLTRSDKNRGKSDDVPSIEVVHEMKSFWSKLLSVKLITQRKFDNLTKAERGGLTEEDKAGFIKRQLVETRQITKHVAQILDERFNTEFDGAQRRIRNVKIITLKSNLVSNFRKEFELYKVREINDYHHAHDAYLNAVVGNALLLKYPQLEPEFVYGEYPKYNSYRSRKSATEKFLFYSNILRFFKKEDIQTNEDGEIAWNKEKHIKILRKVLSYPQVNIVKKTEEQTGGFSKESILPKGESDKLIPRKTKNSYWNPKKYGGFDSPVVAYSILVFADVEKGKSKKLRKVQDMVGITIMEKKRFEKNPVDFLEQRGYRNVRLEKIIKLPKYSLFELENKRRRLLASARELQKGNELVIPQRFTTLLYHSYQIEKNYEPEHREYVEKHKDEFKELLEYISVFSRKYVLADNNLTKIEMLFSKNKDAEVSSLAKSFISLLTFTAFGAPAAFNFFGENIDRKRYTSVTECLNATLIHQSITGLYETRIDLSKLGED

SEQ ID NO: 97 - protein, 1377 aa, Streptococcus caballi
MTKKNYSIGLDIGTNSVGWAVITDDYKVPAKKMKVLGNTDKKYIKKNLLGALLFDSGETAEATRLKRTARRRYTRRKNRLRYLQDIFTEEMAKVDDSFFQRLDESFLTDNDKNFDSHPIFGNKAEEDAYHQKFPTIYHLRKHLADSTEKADLRLVYLALAHMIKFRGHFLIEGELNAENTDVQKLFTDFVGVYDRTFDDSHLSEITVDAASILTEKISKSRRLENLINNYPKEKKNTLFGNLIALALGLQPNFKTNFKLSEDAKLQFSKDTYEEDLEELLGKIGDDYADLFTSSKNLYDAILLSGILTVDDNSTKAPLSASMIKRYVEHHEDLEKLKEFIKANKSELYHDIFKDKTQNGYAGYIENGVKQDEFYKYLKGILTKINGSDYFLDKIEREDFLRKQRTFDNGSIPHQIHLQEMHAILRRQGDYYPFLKENQEEIEKILTFRIPYYVGPLARKDSRFAWAEYRSDEKITPWNFDKVIDKEKSAEKFITRMTLNDLYLPEEKVLPKHSHVYETFAVYNELTKVKYVNEQGKDSFFDSNMKQEIFDHVFKENRKVTKEKLLNYLDKEFPEYRIQDLVGLDKENKSFNASLGTYHDLKKILDKSFLDDKVNEEVIEDIIKTLTLFEDREMIQQRLQKYSDIFTKQQLKKLERRHYTGWGRLSYKLINGIRNKENNKTILDYLIDDGSANRNFMQLINDDALSFKQIIQEAQVVGDVDDIETVVHDLPGSPAIKKGILQSVKIVDELIKVMGDNPDNIVIEMARENQTTNRGRSQSQQRLKKLQNSLKELGSNILNEEKPSYIEDKVENSHLQNDQLFLYYIQNGKDMYTGDELDIDHLSDYDIDHIIPQAFIKDDSIDNRVLTSSAKNRGKSDDVPSLGIVRARKAEWVRLYKSGLISKRKFDNLTKAERGGLTEADKAGFIKRQLVETRQITKHVAQILDARFNTERDENDKVIRDVKVITLKSNLVSQFRKEFKFYKVREINDYHHAHDAYLNAVVGTALLKKYPKLAPEFVYGEYKKYDVRKLVAKSSDDHSEMGKATAKYFFYSNLMNFFKRVIRYSNGKVIVRPVVEYSKDTGEIAWNKRTDFEKVRKVLSYPQVNIVKKVETQTGGFSKESILPKGDSDKLIPRKTKKVLWEPKKYGGFDSPTVAYSVLVVADVEKGKTKKLKTVKELVGISIMERSFFEKNPVEFLKNKGYQNVQEDKLMKLPKYSLFEFEGGRRRLLASATELQKGNEIMLSAHLVALLYHAHRIGNFNSAEHLKYVSEHKKEFEEVLSCVENFANVYVDVEKNLSKIRAAADSMDNFSIEEISDSFINLLTLTALGAPADFNFLGEKIPRKRYNSTKECLNATLIHQSITGLYETRIDLSKLGEE

SEQ ID NO: 98 - protein, 1375 aa, Streptococcus canis
MEKKYSIGLDIGTNSVGWAVITDDYKVPSKKFKVLGNTNRKSIKKNLMGALLFDSGETAEATRLKRTARRRYTRRKNRIRYLQEIFANEMAKLDDSFFQRLEESFLVEEDKKNERHPIFGNLADEVAYHRNYPTIYHLRKKLADSPEKADLRLIYLALAHIIKFRGHFLIEGKLNAENSDVAKLFYQLIQTYNQLFEESPLDEIEVDAKGILSARLSKSKRLEKLIAVFPNEKKNGLFGNIIALALGLTPNFKSNFDLTEDAKLQLSKDTYDDDLDELLGQIGDQYADLFSAAKNLSDAILLSDILRSNSEVTKAPLSASMVKRYDEHHQDLALLKTLVRQQFPEKYAEIFKDDTKNGYAGYVGIGIKHRKRTTKLATQEEFYKFIKPILEKMDGAEELLAKLNRDDLLRKQRTFDNGSIPHQIHLKELHAILRRQEEFYPFLKENREKIEKILTFRIPYYVGPLARGNSRFAWLTRKSEEAITPWNFEEVVDKGASAQSFIERMTNFDEQLPNKKVLPKHSLLYEYFTVYNELTKVKYVTERMRKPEFLSGEQKKAIVDLLFKTNRKVTVKQLKEDYFKKIECFDSVEIIGVEDRFNASLGTYHDLLKIIKDKDFLDNEENEDILEDIVLTLTLFEDREMIEERLKTYAHLFDDKVMKQLKRRHYTGWGRLSRKMINGIRDKQSGKTILDFLKSDGFSNRNFMQLIHDDSLTFKEEIEKAQVSGQGDSLHEQIADLAGSPAIKKGILQTVKIVDELVKVMGHKPENIVIEMARENQTTTKGLQQSRERKKRIEEGIKELESQILKENPVENTQLQNEKLYLYYLQNGRDMYVDQELDINRLSDYDVDHIVPQSFIKDDSIDNKVLTRSVENRGKSDNVPSEEVVKKMKNYWRQLLNAKLITQRKFDNLTKAERGGLSEADKAGFIKRQLVETRQITKHVARILDSRMNTKRDKNDKPIREVKVITLKSKLVSDFRKDFQLYKVRDINNYHHAHDAYLNAVVGTALIKKYPKLESEFVYGDYKVYDVRKMIAKSEQEIGKATAKRFFYSNIMNFFKTEVKLANGEIRKRPLIETNGETGEVVWNKEKDFATVRKVLAMPQVNIVKKTEVQTGGFSKESILSKRESAKLIPRKKGWDTRKYGGFGSPTVAYSILVVAKVEKGKAKKLKSVKVLVGITIMEKGSYEKDPIGFLEAKGYKDIKKELIFKLPKYSLFELENGRRRMLASATELQKANELVLPQHLVRLLYYTQNISATTGSNNLGYIEQHREEFKEIFEKIIDFSEKYILKNKVNSNLKSSFDEQFAVSDSILLSNSFVSLLKYTSFGASGGFTFLDLDVKQGRLRYQTVTEVLDATLIYQSITGLYETRTDLSQLGGD

SEQ ID NO: 99 - protein, 1345 aa, Streptococcus constellatus
MGKPYSIGLDIGTNSVGWAVVTDDYKVPAKKMKVLGNTDKQSIKKNLLGALLFDSGETAEATRLKRTARRRYTRRKNRLRYLQEIFTGEMNKVDENFFQRLDDSFLVDEDKRGEHHPIFGNIAAEVKYHDDFPTIYHLRRHLADTSKKADLRLVYLALAHMIKFRGHFLYEGDLKAENTDVQALFKDFVEEYDKTIEESHLSEITVDALSILTEKVSKSSRLENLIAHYPTEKKNTLFGNLIALSLDLHPNFKTNFQLSEDAKLQFSKDTYEEDLEGFLGEVGDEYADLFASAKNLYDAILLSGILTVDDNSTKAPLSASMVKRYEEHQKDLKKLKDFIKVNAPDQYNAIFKDKNKKGYASYIESGVKQDEFYKYLKGILLKINGSGDFLDKIDREDFLRKQRTFDNGSIPHQIHLQEMHAILRRQGEHYPFLKENQDKIEKILTFRIPYYVGPLARKGSRFAWAEYKADEKITPWNFDDILDKEKSAEKFITRMTLNDLYLPEEKVLPKHSPLYEAFTVYNELTKVKYVNEQGEAKFFDTNMKQEIFDHVFKENRKVTKDKLLNYLNKEFEEFRIVNLTGLDKENKAFNSSLGTYHDLRKILDKSFLDDKANEKTIEDIIQTLTLFEDREMIRQRLQKYSDIFTKAQLKKLERRHYTGWGRLSYKLINGIRNKENKKTILDYLIDDGYANRNFMQLINDDALSFKEEIARAQIIDDVDDIANVVHDLPGSPAIKKGILQSVKIVDELVKVMGHNPANIIIEMARENQTTDKGRRNSQQRLKLLQDSLKNLDNPVNIKNVENQQLQNDRLFLYYIQNGKDMYTGETLDINNLSQYDIDHIIPQAFIKDNSLDNRVLTRSDKNRGKSDDVPSIEVVHEMKSFWSKLLSVKLITQRKFDNLTKAERGGLTEEDKAGFIKRQLVETRQITKHVAQILDERFNTEFDGNKRRIRNVKIITLKSNLVSNFRKEFELYKVREINDYHHAHDAYLNAVVGNALLLKYPQLEPEFVYGEYPKYNSYRSRKSATEKFLFYSNILRFFKKEDIQTNEDGEIAWNKEKHIKILRKVLSYPQVNIVKKTEEQTGGFSKESILPKGESDKLIPRKTKNSYWDPKKYGGFDSPVVAYSILVFADVEKGKSKKLRKVQDMVGITIMEKKRFEKNPVDFLEQRGYRNVRLEKIIKLPKYSLFELENKRRRLLASAKELQKGNELVIPQRFTTLLYHSYRIEKDYEPEHREYVEKHKDEFKELLEYISVFSRKYVLADNNLTKIEMLFSKNKDAEVSSLAKSFISLLTFTAFGAPAAFNFFGENIDRKRYTSVTECLNATLIHQSITGLYETRIDLSKLGED

SEQ ID NO: 100 - protein, 1365 aa, Streptococcus constellatus
MTQKYSIGLDIGTNSVGWAIVTDDYKVPAKKMKILGNTNKQYIKKNLLGALLFDSGETAKATRLKRTARRRYTRRKNRLRYLQEIFIEEMNKVDENFFQRLDDSFLVTEDKRGSKYPIFGTLKEEKEYYKEFETIYHLRKRLADSTGKVDLRLVYLALAHMIKFRGHFLIEGQLKAENTDVQTLFNDFVEVYDKTIEESHLAEITVDALSILTEKVSKSRRLENLVKCYPTEKKNTLFGNLIALSLGLQPNFKTNFQLSEDAKLQFSKDTYEEDLEELLGKIGDDYADLFTSAKNLYDTILLSGILAVDDNSTKALLSASMIKRYEEHQKDLKKLKDFIKVNAPAQYDDIFKDETKNGYAGYIENGVKQDEFYKYLKNTLSKIDGSGYFLDKIEREDFLRKQRTFDNGSIPHQIHLQEMHAILRRQGEHYPFLKENQDKIEKILTFRIPYYVGPLVRKGSRFAWAEYKADEKITPWNFDDILDKEKSAEKFITRMTLNDLYLPEEKVLPKHSLLYEIFTVYNELTKVKYVNEQGEAKFFDANMKQEIFDHVFKENPKVTKDKLLNYLDKEFDEFRIVDLTGLDKENKAFNASLGTYHDLRKILDKSFLDDKANEKTIEDIIQTLTLFEDREMIRQRLQKYSDIFTKAQLKKLERRHYTGWGRLSYKLINGIRNKENNKTILEYLVDDGYANRNFMQLINDDTLPFKQIIKDAQAIDDVDDIELIVHDLPGSPAIKKGILQSIKIVDELVKVMGYNPDNIVIEMARENQTTTKGRRNSQQRLKLLQDSLTNLDNPVSIKNVENQQLQNDRLFLYYIQNGKDMYTGEELDIHHLSDYDIDHIIPQAFIKDDSIDNRVLTSSAKNRGKSDNVPNLEVVCDRKADWIRLREAGLISQRKFDNLTKAERGGLTENDKAGFIHRQLVETRQITKHVAQILDARFNPKRDDNKKVIRDVKIITLKSNLVSQFRRDFKLYKVREINDYHHAHDAYLNAVVGTALLKKYPKLTSEFVYGEYKKYDVRKFIAKSDNDEIGKATAKYFFYSNLMNFFKTEVKFADGTVVERPDIETSEDGEIAWNKQTDFKIVRKVLSYPQVNIVKKVEKQTGRFSKESILPKGDSDKLIARKTKENYWDTKKYGGFDSPTVAYSVLVVADIKKGKAKKLKTVKELVGISIMERPFFEKNPIMFLESKGYRNIQKDKLIKLPKYSLFEFEGGRRRLLASAVELQKGNEMVLPQYLNNLLYHAHRIDNSDNSEHLKYITEHKEEFGKLLSYIENFAKSYVDVDKNLEKIQLAVEKIDSFSVKEISNSFIHLLTLTALGAPADFNFLGEKIPRKRYTSTKECLNATLIHQSITGLYETQTDLSKLGED

SEQ ID NO: 101 - protein, 1371 aa, Streptococcus dysgalactiae
MDKKYSIGLDIGTNSVGWAVITDDYKVPSKKFKVLGNTDRHSIKKNLIGALLFDSGETAEATRLKRTARRRYTRRKNRIRYLQEIFSSEMSKVDDSFFHRLEESFLVEEDKKHERHPIFGNIVDEVAYHEKYPTIYHLRKKLADSTDKADLRLIYLALAHMIKFRGHFLIEGDLNPDNSDMDKLFIQLVQTYNQLFEENPINASRVDAKAILSARLSKSRRLENLIAQLPGEKRNGLFGNLIALSLGLTPNFKSNFDLAEDAKLQLSKDTYDDDLDNLLAQIGDQYADLFLAAKNLSDAILLSDILRVNSEITKAPLSASMIKRYDEHHQDLTLLKALVRQQLPEKYKEIFFDQSKNGYAGYIDGGASQEEFYKFIKPILEKMDGTEELLAKLNREDLLRKQRTFDNGSIPHQIHLGELHAILRRQEDFYPFLKDNREKIEKILTFRIPYYVGPLARGNSRFAWMTRKSEETITPWNFEEVVDKGASAQSFIERMTNFDKNLPNEKVLPKHSLLYEYFTVYNELTKVKYVTEGMRKPEFLSGKQKEAIVDLLFKTNRKVTVKQLKEDYFKKIECFDSVEISGVEDRFNASLGTYHDLLKIIKDKDFLDNEENEDILEDIVLTLTLFEDKEMIEERLKKYANLFDDKVMKQLKRRHYTGWGRLSRKLINGIRDKQSGKTILDFLKSDGFANRNFMQLINDDSLTFKEAIQKAQVSGQGHSLHEQIANLAGSPAIKKGILQSVKVVDELVKVMGHKPENIVIEMARENQTTQKGQKNSRERMKRIEEGIKELGSQILKEHPVENTQLQNEKLYLYYLQNGRDMYVDQELDINRLSDYDVDHIVPQSFIKDDSIDNKILTRSDKNRGKSDNVPSEEVVKKMKNYWRQLLNAKLITQRKFDNLTKAERGGLSELDKAGFIKRQLVETRQITKHVAQILDSRMNTKYDENDKLIREVKVITLKSKLVSDFRKDFQFYKVREINNYHHAHDAYLNAVVGTALIKKYTKLESEFVYGDYKVYDVRKMIAKSEQEIGKATAKRFFYSNIMNFFKTEITLANGEIRKRPLIETNEETGEIVWDKGRDFATVRKVLSMPQVNIVKKTEVQTGALTNESIYARGSFDKLISRKHRFESSKYGGFGSPTVTYSVLVVAKSKVQDGKVKKIKTGKELIGMTLLDKLVFEKNPLKFIEDKGYGNVQIDKCIKLPKYSLFEFENGTRRMLASVMANNNSRGDLQKANEMFLPAKLVTLLYHAHKIESSKELEHEAYILDHYNDLYQLLSYIERFASLYVDVEKNISKVKELFSNIESYSISEICSSVINLLTLTASGAPADFKFLGTTIPRKRYGSPQSILSSTLIHQSITGLYETRIDLSQLGGD

SEQ ID NO: 102 - protein, 1371 aa, Streptococcus dysgalactiae
MDKKYSIGLDIGTNSVGWAVITDDYKVPSKKFKVLGNTDRHSIKKNLIGALLFDSGETAEATRLKRTARRRYTRRKNRIRYLQEIFSSEMSKVDDSFFHRLEESFLVEEDKKHERHPIFGNIVDEVAYHEKYPTIYHLRKKLADSTDKADLRLIYLALAHMIKFRGHFLIEGDLNPDNSDVDKLFIQLVQTYNQLFEEKPINASGVDAKAILSARLSKSKRLENLIAQLPGEKKNGLFGNLIALSLGLTPNFKSNFDLAEDAKLQLSKDTYDDDLDNLLAQIGNQYADLFLAAKNLSDAILLSDILRVNSEITKAPLSASMIKRYDEHHQDLTLLKALVRQQLPEKYKEIFFDQSKNGYAGYIDGGASQEEFYKFIKPILEKMDGTEELLAKLNREDLLRKQRTFDNGSIPHQIHLGELHAILRRQEDFYPFLKDNREKIEKILTFRIPYYVGPLARGNSRFAWMTRKSEETITPWNFEEVVDKGASAQSFIERMTNFDKNLPNEKVLPKHSLLYEYFTVYNELTKVKYVTEGMRKPEFLSGKQKEAIVDLLFKTNRKVTVKQLKEDYFKKIECFDSVEISGVEDRFNASLGTYHDLLKIIKDKDFLDNEENEDILEDIVLTLTLFEDKEMIEERLKKYANLFDDKVMKQLKRRHYTGWGRLSRKLINGIRDKQSGKTILDFLKSDGFANRNFMQLINDDSLTFKEAIQKAQVSGQGHSLHEQIANLAGSPAIKKGILQSVKVVDELVKVMGHKPENIVIEMARENQTTQKGQKNSRERMKRIEEGIKELGSQILKEHPVENTQLQNEKLYLYYLQNGRDMYVDQELDINRLSDYDVDHIVPQSFIKDDSIDNKVLTRSDKNRGKSDNVPSEEVVKKMKNYWRQLLNAKLITQRKFDNLTKAERGGLSELDKAGFIKRQLVETRQITKHVAQILDSRMNTKYDENDKLIREVKVITLKSKLVSDFRKDFQFYKVREINNYHHAHDAYLNAVVGTALIKKYPKLESEFVYGDYKVYDVRKMIAKSEQEIGKATAKRFFYSNIMNFFKTEITLANGEIRKRPLIETNEETGEIVWDKGRDFATVRKVLSMPQVNIVKKTEVQTGALTNESIYARGSFDKLISRKHRFESSKYGGFGSPTVTYSVLVVAKSKVQDGKVKKIKTGKELIGITLLDKLVFEKNPLKFIEDKGYGNVQIDKCIKLPKYSLFEFENGTRRMLASVMANNNSRGDLQKANEMFLPAKLVTLLYHAHKIESSKELEHEAYILDHYNDLYQLLSYIERFASLYVDVEKNISKVKELFSNIESYSISEICSSVINLLTLTASGAPADFKFLGTTIPRKRYGSPQSILSSTLIHQSITGLYETRIDLSQLGGD

SEQ ID NO: 103 - protein, 1371 aa, Streptococcus dysgalactiae
MDKKYSIGLDIGTNSVGWAVITDDYKVPSKKFKVLGNTDRHSIKKNLIGALLFDSGETAEATRLKRTARRRYTRRKNRIRYLQEIFSSEMSKVDDSFFHRLEESFLVEEDKKHERHPIFGNIVDEVAYHEKYPTIYHLRKKLADSTDKADLRLIYLALAHMIKFRGHFLIEGDLNPDNSDMDKLFIQLVQTYNQLFEENPINASRVDAKAILSARLSKSRRLENLIAQLPGEKRNGLFGNLIALSLGLTPNFKSNFDLAEDAKLQLSKDTYDDDLDNLLAQIGDQYADLFLAAKNLSDAILLSDILRVNSEITKAPLSASMIKRYDEHHQDLTLLKALVRQQLPEKYKEIFFDQSKNGYAGYIDGGASQEEFYKFIKPILEKMDGTEELLAKLNREDLLRKQRTFDNGSIPHQIHLGELHAILRRQEDFYPFLKDNREKIEKILTFRIPYYVGPLARGNSRFAWMTRKSEETITPWNFEEVVDKGASAQSFIERMTNFDKNLPNEKVLPKHSLLYEYFTVYNELTKVKYVTEGMRKPEFLSGKQKEAIVDLLFKTNRKVTVKQLKEDYFKKIECFDSVEISGVEDRFNASLGTYHDLLKIIKDKDFLDNEENEDILEDIVLTLTLFEDKEMIEERLKTYAHLFDDKVMKQLKRRHYTGWGRLSRKLINGIRDKQSGKTILDFLKSDGFANRNFIQLIHDDSLTFKEAIQKAQVSGQGHSLHEQIANLAGSPAIKKGILQSVKVVDELVKVMGHKPENIVIEMARENQTTQKGQKNSRERMKRIEEGIKELGSQILKEHPVENTQLQNEKLYLYYLQNGRDMYVDQELDINRLSDYDVDHIVPQSFIKDDSIDNKVLTRSDKNRGKSDDVPSEEVVKKMKNYWRQLLNAKLITQRKFDNLTKAERGGLSELDKAGFIKRQLVETRQITKHVAQILDSRMNTKYDENDKLIREVKVITLKSKLVSDFRKDFQFYKVREINNYHHAHDAYLNAVVGTALIKKYPKLESEFVYGDYKVYDVRKMIAKSEQEIGKATAKRFFYSNIMNFFKTEITLANGEIRKRPLIETNEETGEIVWNKGRDFATVRKVLSMPQVNIVKKTEVQTGALTNESIYARGSFDKLISRKHRFESSKYGGFGSPTVTYSVLVVAKSKVQDGKVKKIKTGKELIGITLLDKLVFEKNPLKFIEDKGYGNVQIDKCIKLPKYSLFEFENGTRRMLASVMANNNSRGDLQKANEMFLPAKLVTLLYHAHKIESSKELEHEAYILDHYNDLYQLLSYIERFASLYVDVEKNISKVKELFSNIESYSISEICSSVINLLTLTASGAPADFKFLGTTIPRKRYGSPQSILSSTLIHQSITGLYETRIDLSQLGGD

SEQ ID NO: 104 - protein, 1371 aa, Streptococcus dysgalactiae
MDKKYSIGLDIGTNSVGWAVITDDYKVPSKKFKVLGNTDRHSIKKNLIGALLFDSGETAEATRLKRTARRRYTRRKNRIRYLQEIFSSEMSKVDDSFFHRLEESFLVEEDKKHERHPIFGNIVDEVAYHEKYPTIYHLRKKLADSTDKADLRLIYLALAHMIKFRGHFLIEGDLNPDNSDMDKLFIQLVQTYNQLFEENPINASRVDAKAILSARLSKSRRLENLIAQLPGEKRNGLFGNLIALSLGLTPNFKSNFDLAEDAKLQLSKDTYDDDLDNLLAQIGDQYADLFLAAKNLSDAILLSDILRVNSEITKAPLSASMIKRYDEHHQDLTLLKALVRQQLPEKYKEIFFDQSKNGYAGYIDGGASQEEFYKFIKPILEKMDGTEELLAKLNREDLLRKQRTFDNGSIPHQIHLGELHAILRRQEDFYPFLKDNREKIEKILTFRIPYYVGPLARGNSRFAWMTRKSEETITPWNFEEVVDKGASAQSFIERMTNFDKNLPNEKVLPKHSLLYEYFTVYNELTKVKYVTEGMRKPEFLSGKQKEAIVDLLFKTNRKVTVKQLKEDYFKKIECFDSVEISGVEDRFNASLGTYHDLLKIIKDKDFLDNEENEDILEDIVLTLTLFEDKEMIEERLKKYANLFDDKVMKQLKRRHYTGWGRLSRKLINGIRDKQSGKTILDFLKSDGFANRNFMQLINDDSLTFKEAIQKAQVSGQGHSLHEQIANLAGSPAIKKGILQSVKVVDELVKVMGHKPENIVIEMARENQTTQKGQKNSRERMKRIEEGIKELGSQILKEHPVENTQLQNEKLYLYYLQNGRDMYVDQELDINRLSDYDVDHIVPQSFIKDDSIDNKVLTRSDKNRGKSDNVPSEEVVKKMKNYWRQLLNAKLITQRKFDNLTKAERGGLSELDKAGFIKRQLVETRQITKHVAQILDSRMNTKYDENDKLIREVKVITLKSKLVSDFRKDFQFYKVREINNYHHAHDAYLNAVVGTALIKKYPKLESEFVYGDYKVYDVRKMIAKSEQEIGKATAKRFFYSNIMNFFKTEITLANGEIRKRPLIETNEETGEIVWDKGRDFATVRKVLSMPQVNIVKKTEVQTGALTNESIYARGSFDKLISRKHRFESSKYGGFGSPTVTYSVLVVAKSKVQDGKVKKIKTGKELIGITLLDKLVFEKNPLKFIEDKGYGNVQIDKCIKLPKYSLFEFENGTRRMLASVMANNNSRGDLQKANEMFLPAKLVTLLYHAHKIESSKELEHEAYILDHYNDLYQLLSYIERFASLYVDVEKNISKVKELFSNIESYSISEICSSVINLLTLTASGAPADFKFLGTTIPRKRYGSPQSILSSTLIHQSITGLYETRIDLSQLGGD

SEQ ID NO: 105 - protein, 1371 aa, Streptococcus dysgalactiae
MDKKYSIGLDIGTNSVGWAVITDDYKVPSKKFKVLGNTDRHSIKKNLIGALLFDSGETAEATRLKRTARRRYTRRKNRIRYLQEIFSSEMSKVDDSFFHRLEESFLVEEDKKHERHPIFGNIVDEVAYHEKYPTIYHLRKKLADSTDKADLRLIYLALAHMIKFRGHFLIEGDLNPDNSDMDKLFIQLVQTYNQLFEENPINASRVDAKAILSARLSKSRRLENLIAQLPGEKRNGLFGNLIALSLGLTPNFKSNFDLAEDAKLQLSKDTYDDDLDNLLAQIGDQYADLFLAAKNLSDAILLSDILRVNSEITKAPLSASMIKRYDEHHQDLTLLKALVRQQLPEKYKEIFFDQSKNGYAGYIDGGASQEEFYKFIKPILEKMDGTEELLAKLNREDLLRKQRTFDNGSIPHQIHLGELHAILRRQEDFYPFLKDNREKIEKILTFRIPYYVGPLARGNSRFAWMTRKSEETITPWNFEEVVDKGASAQSFIERMTNFDKNLPNEKVLPKHSLLYEYFTVYNELTKVKYVTEGMRKPEFLSGKQKEAIVDLLFKTNRKVTVKQLKEDYFKKIECFDSVEISGVEDRFNASLGTYHDLLKIIKDKDFLDNEENEDILEDIVLTLTLFEDKEMIEERLKTYAHLFDDKVMKQLKRRHYTGWGRLSRKLINGIRDKQSGKTILDFLKSDGFANRNFIQLIHDDSLTFKEAIQKAQVSGQGHSLHEQIANLAGSPAIKKGILQSVKVVDELVKVMGHKPENIVIEMARENQTTQKGQKNSRERMKRIEEGIKELGSQILKEHPVENTQLQNEKLYLYYLQNGRDMYVDQELDINRLSDYDVDHIVPQSFIKDDSIDNKVLTRSDKNRGKSDDVPSEEVVKKMKNYWRQLLNAKLITQRKFDNLTKAERGGLSELDKAGFIKRQLVETRQITKHVAQILDSRMNTKYDENDKLIREVKVITLKSKLVSDFRKDFQFYKVREINNYHHAHDAYLNAVVGTALIKKYPKLESEFVYGDYKVYDVRKMIAKSEQEIGKATAKRFFYSNIMNFFKTEITLANGEIRKRPLIETNEETGEIVWDKGRDFATVRKVLSMPQVNIVKKTEVQTGALTNESIYARGSFDKLISRKHRFESSKYGGFGSPTVTYSVLVVAKCKVQDGKVKKIKTGKELIGITLLDKLVFEKNPLKFIEDKGYGNVQIDKCIKLPKYSLFEFENGTRRMLASVMANNNSRGDLQKANEMFLPAKLVTLLYHAHKIESSKELEHEAYILDHYNDLYQLLSYIERFASLYVDVEKNISKVKELFSNIESYSISEICSSVINLLTLTASGAPADFKFLGTTIPRKRYGSPQSILSSTLIHQSITGLYETRIDLSQLGGD

SEQ ID NO: 106 - protein, 1371 aa, Streptococcus dysgalactiae
MDKKYSIGLDIGTNSVGWAVITDDYKVPSKKFKVLGNTDRHSIKKNLIGALLFDSGETAEATRLKRTARRRYTRRKNRIRYLQEIFSSEMSKVDDSFFHRLEESFLVEEDKKHERHPIFGNIVDEVAYHEKYPTIYHLRKKLADSTDKADLRLIYLALAHMIKFRGHFLIEGDLNPDNSDVDKLFIQLVQTYNQLFEENPINASRVDAKAILSARLSKSRRLENLIAQLPGEKRNGLFGNLIALSLGLTPNFKSNFDLAEDAKLQLSKDTYDDDLDNLLAQIGDQYADLFLAAKNLSDAILLSDILRVNSEITKAPLSASMIKRYDEHHQDLTLLKALVRQQLPEKYKEIFFDQSKNGYAGYIDGGASQEEFYKFIKPILEKMDGTEELLAKLNREDLLRKQRTFDNGSIPHQIHLGELHAILRRQEDFYPFLKDNREKIEKILTFRIPYYVGPLARGNSRFAWMTRKSEETITPWNFEEVVDKGASAQSFIERMTNFDKNLPNEKVLPKHSLLYEYFTVYNELTKVKYVTEGMRKPAFLSGEQKKAIVDLLFKTNRKVTVKQLKEDYFKKIECFDSVEISGVEDRFNASLGTYHDLLKIIKDKDFLDNEENEDILEDIVLTLTLFEDKEMIEERLKTYAHLFDDKVMKQLKRRHYTGWGRLSRKLINGIRDKQSGKTILDFLKSDGFANRNFIQLIHDDSLTFKEAIQKAQVSGQGHSLHEQIANLAGSPAIKKGILQSVKVVDELVKVMGHKPENIVIEMARENQTTQKGQKNSRERMKRIEEGIKELGSQILKEHPVENTQLQNEKLYLYYLQNGRDMYVDQELDINRLSDYDVDHIVPQSFIKDDSIDNKVLTRSDKNRGKSDNVPSEEVVKKMKNYWRQLLNAKLITQRKFDNLTKAERGGLSELDKAGFIKRQLVETRQITKHVAQILDSRMNTKYDENDKLIREVKVITLKSKLVSDFRKDFQFYKVREINNYHHAHDAYLNAVVGTALIKKYPKLESEFVYGDYKVYDVRKMIAKSEQEIGKATAKRFFYSNIMNFFKTEITLANGEIRKRPLIETNEETGEIVWDKGRDFATVRKVLSMPQVNIVKKTEVQTGALTNESIYARGSFDKLISRKHRFESSKYGGFGSPTVTYSVLVVAKSKVQDGKVKKIKTGKELIGITLLDKLVFEKNPLKFIEDKGYGNVQIDKCIKLPKYSLFEFENGTRRMLASVMANNNSRGDLQKANEMFLPAKLVTLLYHAHKIESSKELEHEAYILDHYNDLYQLLSYIERFASLYVDVEKNISKVKELFSNIESYSISEICSSVINLLTLTASGAPADFKFLGTTIPRKRYGSPQSILSSTLIHQSITGLYETRIDLSQLGGD

SEQ ID NO: 107 - protein, 1348 aa, Streptococcus equi
MKKPYTIALDIGTNSVGWVVVTDDYRVPTKKMKVLGNTERKTIKKNLIGALLFDSGDTAEGTRLKRTARRRYTRRKNRLRYLKEIFTEEMAKVDDGFFQRLEDSFYVLEDKEGNKHPIFANLADEVAYHKKYPTIYHLRKELVDNPQKADLRLIYLAVAHIIKFRGHFLIEGTLSSKNNNLQKSFDHLVDTYNLLFEEQRLLTEGINAKELLSAALSKSKRLENLISLIPGQKKTGIFGNIIALSLGLTPNFKANFGLSKDVKLQLAKDTYADDLDSLLAQIGDQYADLFLAAKNLSDAILLSDILTESDEITRAPLSASMVKRYREHHKDLVTLKTLIKDQLPEKYQEIFLDKTKNGYAGYIEGQVSQEEFYKYLKPILARLDGSEPLLLKIDREDFLRKQRTFDNGSIPHQIHLEELHAILRRQEVFYPFLKDNRKKIESLLTFRIPYYVGPLARGHSRFAWVKRKFDGAIRPWNFEEIVDEEASAQIFIEKMTKNDLYLPNEKVLPKHSLLYETFTVYNELTKVKYATEGMTRPQFLSADQKQAIVDLLFKTNRKVTVKQLKENYFKKIECWDSVEITGVEDSFNASLGTYHDLLKIIQDKDFLDNPDNQKIIEDIILTLTLFEDKKMISKRLDQYAHLFDKVVLNKLERHHYTGWGRLSGKLINGIRDKQSGKTILDFLKADGFANRNFMQLIHDSELSFIDEIAKAQVIGKTEYSKDLVGNLAGSPAIKKGISQTIKIVDELVKIMGYLPQQIVIEMARENQTTAQGIKNARQRMRKLEETAKKLGSNILKEHPVDNSQLQNDKRYLYYLQNGKDMYTGDDLDIDYLSSYDIDHIIPQSFIKNNSIDNKVLTSQGANRGKLDNVPSEAIVRKMKGYWQSLLRAGAISKQKFDNLTKAERGGLTQVDKAGFIQRQLVETRQITKHVAQILDSRFNTEFDDHNKRIRKVHIITLKSKLVSDFRKEFGLYKIRDINHYHHAHDAYLNAVVAKAILGKYPQLAPEFVYGDYPKYNSFKERQKATQKMLFYSNILKFFKDQESLHVNSDGEEIWNANKHLPIIKNVLSIPQVNIVKKTEVQTGGFYKESILSKGNSDKLIPRKNNWDTRKYGGFDSPTVAYSVLVIAKMEKGKAKVLKPVKEMVGITIMERTAFEENPVVFLEARGYREIQEHLIIKLPKYSLFELENGRRRLLASASELQKGNELFLPVDYMTFLYLAAHYHELTGSSEDVLRKKYFVDRHLHYFDDIIQMINDFAERHILASSNLEKINHTYHNNSDLPVNERAENIINVFTFVALGAPAAFKFFDATIDRKRYTSTKEVLNATLIHQSVTGLYETRIDLSQLGEN

SEQ ID NO: 108 - protein, 1348 aa, Streptococcus equi
MKKPYTIALDIGTNSVGWVVVTDDYRVPTKKMKVLGNTERKTIKKNLIGALLFDSGDTAEGTRLKRTARRRYTRRKNRLRYLKEIFTEEMAKVDDGFFQRLEDSFYVLEDKEGNKHPIFANLADEVAYHKKYPTIYHLRKELVDNPQKADLRLIYLAVAHIIKFRGHFLIEGTLSSKNNNLQKSFDHLVDTYNLLFEEQRLLTEGINAKELLSAALSKSKRLENLISLIPGQKKTGIFGNIIALSLGLTPNFKANFGLSKDVKLQLAKDTYADDLDSLLAQIGDQYADLFLAAKNLSDAILLSDILTESDEITRAPLSASMVKRYREHHKDLVTLKTLIKDQLPEKYQEIFLDKTKNGYAGYIEGQVSQEEFYKYLKPILARLDGSEPLLLKIDREDFLRKQRTFDNGSIPHQIHLEELHAILRRQEVFYPFLKDNRKKIESLLTFRIPYYVGPLARGHSRFAWVKRKFDGAIRPWNFEEIVDEEASAQIFIEKMTKNDLYLPNEKVLPKHSLLYETFTVYNELTKVKYATEGMTRPQFLSADQKQAIVDLLFKTNRKVTVKQLKENYFKKIECWDSVEITGVEDSFNASLGTYHDLLKIIQDKDFLDNPDNQKIIEDIILTLTLFEDKKMISKRLDQYAHLFDKVVLNKLERHHYTGWGRLSGKLINGIRDKQSGKTILDFLKADGFANRNFMQLIHDSELSFIDEIAKAQVIGKTEYSKDLVGNLASSPAIKKGISQTIKIVDELVKIMGYLPQQIVIEMARENQTTAQGIKNARQRMRKLEETAKKLGSNILKEHPVDNSQLQNDKRYLYYLQNGKDMYTGDDLDIDYLSSYDIDHIIPQSFIKNNSIDNKVLTSQGANRGKLDNVPSEAIVRKMKGYWQSLLRAGAISKQKFDNLTKAERGGLTQVDKAGFIQRQLVETRQITKHVAQILDSRFNTEFDDHNKRIRKVHIITLKSKLVSDFRKEFGLYKIRDINHYHHAHDAYLNAVVAKAILGKYPQLAPEFVYGDYPKYNSFKERQKATQKTLFYSNILKFFKDQESLHVNSDGEEIWNANKHLPIIKNVLSIPQVNIVKKTEVQTGGFYKESILSKGNSDKLIPRKNNWDTRKYGGFDSPTVAYSVLVIAKMEKGKAKVLKPVKEMVGITIMERIAFEENPVVFLEAKGYREIQEHLIIKLPKYSLFELENGRRRLLASASELQKGNELFLPVDYMTFLYLAAHYHELTGSSEDVLRKKYFVERHLHYFDDIIQMINDFAERHILASSNLEKINHTYHNNSDLPINERAENIINVFTFVALGAPAAFKFFDATIDRKRYTSTKEVLNATLIHQSVTGLYETRIDLSQLGEN

SEQ ID NO: 109 - protein, 1348 aa, Streptococcus equi
MKKPYTIALDIGTNSVGWVVVTDDYRVPTKKMKVLGNTERKTIKKNLIGALLFDSGDTAEGTRLKRTARPRYTRRKNRLRFLKEIFTEEMAKVDDGFFQRLEDSFYVLEDKEGNKHPIFANLADEVAYHKKYPTIYHLRKELVDNPQKADLRLIYLAVAHIIKFRGHFLIEGTLSSKNNNLQKSFDHLVDTYNLLFEEQRLLTEGINAKELLSAALSKSKRLENLISLIPGQKKTGIFGNIIALSLGLTPNFKANFGLSKDVKLQLAKDTYADDLDSLLAQIGDQYADLFLAAKNLSDAILLSDILTESDEITRAPLSASMVKRYREHHKDLVTLKTLIKDQLPEKYQEIFLDKTKNGYAGYIEGQVSQEEFYKYLKPILARLDGSEPLLLKIDREDFLRKQRTFDNGSIPHQIHLEELHAILRRQEVFYPFLKDNRKKIESLLTFRIPYYVGPLARGHSRFAWVKRKFDGAIRPWNFEEIVDEEASAQIFIEKMTKNDLYLPNEKVLPKHSLLYETFTVYNELTKVKYATEGMTRPQFLSADQKQAIVDLLFKTNRKVTVKQLKENYFKKIECWDSVEITGVEDSFNASLGTYHDLLKIIQDKDFLDNPDNQKIIEDIILTLTLFEDKKMISKRLDQYAHLFDKVVLNKLERHHYTGWGRLSGKLINGIRDKQSGKTILDFLKADGFANRNFMQLIHDSELSFIDEIAKAQVIGKTEYSKDLVGNLAGSPAIKKGISQTIKIVDELVKIMGYLPQQIVIEMARENQTTAQGIKNARQRMRKLEETAKKLGSNILKEHPVDNSQLQNDKRYLYYLQNGKDMYTGDDLDIDYLSSYDIDHIIPQSFIKNNSIDNKVLTSQGANRGKLDNVPSEAIVRKMKGYWQSLLRAGAISKQKFDNLTKAERGGLTQVDKAGFIQLQLVETRQITKHVAQILDSRFNTEFDDHNKRIRKVHIITLKSKLVSDFRKEFGLYKIRDINHYHHAHDAYLNAVVAKAILGKYPQLAPEFVYGDYPKYNSFKERQKATQKTLFYSNILKFFKDQESLHVNSDGEEIWNANKHLPIIKNVLSIPQVNIVKKTEVQTGGFYKESILSKGNSDKLIPRKNNWDTRKYGGFDSPTVAYSVLVIAKMEKGKAKVLKPVKEMVGITIMERIAFEENPVVFLEAKGYREIQEHLIIKLPKYSLFELENGRRRLLASASELQKGNELFLPVDYMTFLYLAAHYHELTGSSEDVLRKKYFVERHLHYFDDIIQMINDFAERHILASSNLEKINHTYHNNSDLPVNERAENIINVFTFVALGAPAAFKFFDATIDRKRYTSTKEVLNATLIHQSVTGLYETRIDLSQLGEN

SEQ ID NO: 110 - protein, 1377 aa, Streptococcus equinus
MEKTYSIGLDIGTNSVGWAVITDDYKVPAKKMKVLGNTDKKYIKKNLLGALLFDSGETAEATRLKRAARRRYTRRKNRLRYLQEIFAKEMAKVDESFFQRLEESFLTDDDKTFDSHPIFGNKAEEDTYHQEFPTIYHLRKHLADSPEKVDLRLVYLALAHMIKFRGHFLIEGQLNAENTDVQKIFADFVGVYDRTFDDSHLSEITVDAASILTEKISKSRRLENLIKQYPTEKKNTLFGNLVALALGLQPNFKTNFKLSEDAKLQFSKDTYDEDLEELLGKIGDDYADLFTAAKNLYDAILLSGILTVDDNSTKAPLSASMIKRYEEHHEDLEKLKTFIKVNNFDKYHEIFKDKSKNGYAGYIENGVKQDIFYKHLKSIISEKNGGQYFLDKIEREDFLRKQRTFDNGSIPYQIHLQEMRTILRRQGEYYPFLKENQAKIEKILTFRIPYYVGPLARKNSRFAWAKYHSDEPITPWNFDEVVDKEKSAEKFITRMTLNDLYLPEEKVLPKHSYVYETFAVYNELTKIKYVNEQGKSFFFDANMKQEIFDHVFKENRKVTKAKLLSYLNNEFEEFRINDLIGLDKDSKSFNASLGTYHDLKKILDKSFLDDKTNEQIIEDIVLTLTLFEDRDMIHERLQKYSDIFTSQQLKKLERRHYTGWGRLSYKLINGIRNKENNKTILDFLIDDGDANRNFMQLINDDSLSFKTTIQEAQVVGDVDDIEAVVHDLPGSPAIKKGILQSVKIVDELVKVMGHNPQNIVIEMARENQITGYGRNRSNQRLKRLQDSLKEFGSDILSKKKPSYVDSKVENSHLQNDRLFLYYIQNGKDMYTGEELDIDHLSDYDIDHIIPQAFIKDNSIDNRVLTSSAKNRGKSDDVPSIEIVRNRKSYWYKLYKSGLISKRKFDNLTKAERGGLTETDKAGFIKRQLVETRQITKHVAQILDARFNTKCDENDKVIRDVKVITLKSSLVSQFRKEFKFYKVREINDYHHAHDAYLNAVVGTALLKKYPKLAPEFVYGEYKKYDVRKLVAKSSDNHSELGKATAKYFFYSNLMNFFKTEVKYADGRVFERPDIETNADGEVVWNKQRDFNIVRKVLSYPQVNIVKKVEVQTGGFSKESILPKGDSDKLIPRKTKKLQWETQKYGGFDSPTVAYSVLVVADVEKGKTRKLKTVKELVGISIMERSSFEENPVSFLEKKGYHNVQEDKLIKLPKYSLFEFEGGRRRLLASATELQKGNEVVLPQYMVNLLYHSQHVNNSHKPEHLNYVKQHKDEFKDIFNLIISIARINILKPKVVDNLINEFTEYGQEDISSLSESFINLLKFISFGAPGAFKFLKLDVKQSNLRYKSTTEALSATLIHQSVTGLYETRIDLSKLGEE

SEQ ID NO: 111 - protein, 1370 aa, Streptococcus gallolyticus
MTKKNYSIGLDIGTNSVGWAVITDDYKVPAKKMKVLGNTDKKYIKKNLLGALLFDSGETAEATRLKRTARRRYTRRKNRLRYLQEIFAEEMTKVDESFFYRLDESFLTTDEKDFERHPIFGNKAEEDAYHQKFPTIYHLRNYLADSSEKADLRLVYLALAHMIKYRGHFLIEGKLNAENTDVQKLFTDFVGVYDRTFDDSHLSEITVDVASTLTEKISKSRRLENLIKYYPTEKKNTLFGNLIALALGLQPNFKMNFKLSEDAKLQFSKDTYEEDLEELLGKIGDDYADLFTSAKNLYDAILLSGILTVDDNSTKAPLSASMIKRYVEHHEDLEKLKEFIKANKSELYHDIFKDKNKNGYAGYIENGVKQDEFYKYLKNTLSKIDGSDYFLDKIEREDFLRKQRTFDNGSIPHQIHLQEMHAILRRQGDYYPFLKEKQDRIEKILTFRIPYYVGPLVRKDSRFAWAEYRSDEKITPWNFDKVIDKEKSAEKFITRMTLNDLYLPEEKVLPKHSHVYETYAVYNELTKIKYVNEQGKESFFDSNMKQEIFDHVFKENRKVTKEKLLNYLNKEFPEYRIKDLIGLDKENKSFNASLGTYHDLKKILDKAFLDDKVNEEVIEDIIKTLTLFEDKDMIHERLQKYSDIFTANQLKKLERRHYTGWGRLSYKLINGIRNKENNKTILDYLIDDGSANRNFMQLINDDTLPFKQIIQKSQVVGDVDDIEAVVHDLPGSPAIKKGILQSVKIVDELVKVMGDNPDNIVIEMARENQTTNRGRSQSQQRLKKLQSSLKELGSNILNEEKPSYIEDKVENSHLQNDQLFLYYIQNGKDMYTGDELDIDHLSDYDIDHIIPQAFIKDDSIDNRVLTSSAKNRGKSDDVPSLDIVRARKAEWVRLYKSGLISKRKFDNLTKAERGGLTEADKAGFIKRQLVETRQITKHVAQILDARFNTEHDENDKVIRDVKVITLKSNLVSQFRKDFEFYKVREINDYHHAHDAYLNAVVGTALLKKYPKLASEFVYGEYKKYDIRKFITNSSDKATAKYFFYSNLMNFFKTKVKYADGTVFERPIIETNADGEIAWNKQIDFEKVRKVLSYPQVNIVKKVETQTGGFSKESILPKGDSDKLIPRKTKKVYWDTKKYGGFDSPTVAYSVFVVADVEKGKAKKLKTVKELVGISIMERSFFEENPVEFLENKGYHNIREDKLIKLPKYSLFEFEGGRRRLLASASELQKGNEMVLPGYLVELLYHAHRADNFNSTEYLNYVSEHKKEFEKVLSCVEDFANLYVDVEKNLSKIRAVADSMDNFSIEEISNSFINLLTLTALGAPADFNFLGEKIPRKRYTSTKECLTATLIHQSITGLYETRIDLSKLGEE

SEQ ID NO: 112 - protein, 1371 aa, Streptococcus gallolyticus
MTEKNYSIGLDIGTNSVGWAVITDDYKVPAKKMKVLGNTDKKYIKKNLLGALLFDNGETAEATRLKRTARRRYTRRKNRLRYLQEIFAEEMAKVDESFFYRLDESFLTTDDKDFERHPIFGNKADEIKYHQEFPTIYHLRKHLADSHEKADLRLIYLALAHMIKFRGHFLIEGELNAENTDVQKLFEAFVEVYDRTFDDSNLSEITVDASSILTEKFSKSRRLENLIKHYPTEKKNTLFGNLVALALGLQPNFKTSFKLSEDAKLQFSKDTYEEDLEELIGKIGDEYADLFTSAKNLYDAILLSGILTVADNTTKAPLSASMIKRYNEHQVDLKKLKEFIKNNASDKYDEIFNDKDKNGYAGYIENGVKQDEFYKYLKTTLSKIDGSDYFLDKIEREDFLRKQRTFDNGSIPHQIHLQEMHAILRRQGEHYAFLKENQAKIEKILTFRIPYYVGPLARKNSRFAWAEYHSDEKITPWNFDEIIDKEKSAEKFITRMTLNDLYLPEEKVLPKHSLVYETYTVYNELTKVKYVNEQGKSNFFDANMKQEIFEHVFKENRKVTKDKFLNYLNKEFPEYRIQDLIGLDKENKSFNASLGTYHDLKKILDKSFLDDKTNETIIEDIIQTLTLFEDRDMIRQRLQKYSDIFTPQQLKKLERRHYTGWGRLSYKLINGIRNKENGKSILDYLIDDGYANRNFMQLISDDTLPFKQIIKDAQIIGDIDDVTSVVRELPGSPAIKKGILQSVKIVDELVKVMGHNPDNIVIEMARENQTTNRGRNQSQQRLKKLQDSLKELGSNILNEEKPSYIEGKVENNHLQDDRLFLYYIQNGKDMYTGDELDIDHLSDYDIDHIIPQAFIKDDSIDNRVLTSSAKNRGKSDDVPSLDIVHDRKADWIRLYKSGLISKRKFDNLTKAERGGLTENDKAGFIKRQLVETRQITKHVAQILDSRFNTERDENDKVIRNVKVITLKSNLVSQFRKDFKFYKVREINDYHHAHDAYLNAVVGTALLKKYPKLAPEFVYGEYKKYDIRKFITSSGDKATAKYFFYSNLMNFFKRVIRYSNGKVVVRPVIECSKDTGEIAWNKQTDFEKVRRVLSYPQVNIVKKVETQTGGFSKESILPKGNSDKLIPRKTKKFRWDTPKYGGFDSPNIAYSVFVIADVEKGKAKKLKTVKELVGISIMERSSFEENPVVFLEKKGYQNVQEDNLIKLPKYSLFEFEGGRRRLLASASELQKGNEVVLSRHLVELLYHAHRVNSFNNSEHLKYVSEHKKEFGEVLSCVENFAKSYVDVEKNLGKIRAVADKIDTFSIEDISISFVNLLTLTALGAPADFNFLGEKIPRKRYTSTKECLNATLIHQSITGLYETRIDLSKLGEE

SEQ ID NO: 113 - protein, 1372 aa, Streptococcus gallolyticus; identical to SEQ ID NO: 12

SEQ ID NO: 114 - protein, 1375 aa, Streptococcus infantarius
MEKSYSIGLDIGTNSVGWAVITDDYKVPAKKMKVLGNTDKKYIKKNLLGALLFDSGETAEVTRLKRTARRRYTRRKNRLRYLQEIFAKEMTKVDESFFQRLEESFLTDDDKTFDSHPIFGNKAEEDAYHQKFPTIYHLRKYLADSQEKADLRLVYLALAHMIKYRGHFLIEGELNAENTDVQKLFNVFVETYDKIVDESHLSEIEVDASSILTEKVSKSRRLENLIKQYPTEKKNTLFGNLIALALGLQPNFKTNFKLSEDAKLQFSKDTYEEDLEELLGKVGDDYADLFISAKNLYDAILLSGILTVDDNSTKAPLSASMIKRYVEHHEDLEKLKEFIKINKLKLYHDIFKDKTKNGYAGYIDNGVKQDEFYKYLKTILTKIDDSDYFLDKIERDDFLRKQRTFDNGSIPHQIHLQEMHSILRRQGDYYPFLKENQAKIEKILTFRIPYYVGPLARKDSRFAWANYHSDEPITPWNFDEVVDKEKSAEKFITRMTLNDLYLPEEKVLPKHSHVYETFTVYNELTKIKYVNEQGESFFFDANMKQEIFDHVFKENRKVTKAKLLSYLNNEFEEFRINDLIGLDKDSKSFNASLGTYHDLKKILDKSFLDDKTNGQIIEDIVLTLTLFEDRDMIHERLQKYSDFFTSQQLKKLERRHYTGWGRLSYKLINGIRNKENNKTILDFLIDDGHANRNFMQLINDESLSFKTIIQEAQVVGDVDDIEAVVHDLPGSPAIKKGILQSVKIVDELVKVMGDNPDNIVIEMARENQTTGYGRNKSNQRLKRLQDSLKEFGSDILSKKKPSYVDSKVENSHLQNDRLFLYYIQNGKDMYTGEELDIDRLSDYDIDHIIPQAFIKDNSIDNKVLTSSAKNRGKSDDVPSIEIVRNRRSYWYKLYKSGLISKRKFDNLTKAERGGLTEADKAGFIKRQLVETRQITKHVAQILDARFNTKRDENDKVIRDVKVITLKSNLVSQFRKEFKFYKVREINDYHHAHDAYLNAVVGTALLKKYPKLTPEFVYGEYKKYDVRKLIAKSSDDYSEMGKATAKYFFYSNLMNFFKTEVKYADGRVFERPDIETNADGEVVWNKQKDFDIVRKVLSYPQVNIVKKVEAQTGGFSKESILSKGDSDKLIPRKTKKVYWNTKKYGGFDSPTVAYSVLVVADIEKGKAKKLKTVKELVGISIMERSFFEENPVSFLEKKGYHNVQEDKLIKLPKYSLFEFEGGRRRLLASATELQKGNEVMLPAHLVELLYHAHRIDSFNSTEHLKYVSEHKKEFEKVLSCVENFSNLYVDVEKNLSKVRAAAESMTNFSLEEISASFINLLTLTALGAPADFNFLGEKIPRKRYTSTKECLSATLIHQSVTGLYETRIDLSKLGEE

SEQ ID NO: 115 - protein, 1368 aa, Streptococcus iniae
MRKPYSIGLDIGTNSVGWAVITDDYKVPSKKMRIQGTTDRTSIKKNLIGALLFDNGETAEATRLKRTTRRRYTRRKYRIKELQKIFSSEMNELDIAFFPRLSESFLVSDDKEFENHPIFGNLKDEITYHNDYPTIYHLRQTLADSDQKADLRLIYLALAHIIKFRGHFLIEGNLDSENTDVHVLFLNLVNIYNNLFEEDIVETASIDAEKILTSKTSKSRRLENLIAEIPNQKRNMLFGNLVSLALGLTPNFKTNFELLEDAKLQISKDSYEEDLDNLLAQIGDQYADLFIAAKKLSDAILLSDIITVKGASTKAPLSASMVQRYEEHQQDLALLKNLVKKQIPEKYKEIFDNKEKNGYAGYIDGKTSQEEFYKYIKPILLKLDGTEKLISKLEREDFLRKQRTFDNGSIPHQIHLNELKAIIRRQEKFYPFLKENQKKIEKLFTFKIPYYVGPLANGQSSFAWLKRQSNESITPWNFEEVVDQEASARAFIERMTNFDTYLPEEKVLPKHSPLYEMFMVYNELTKVKYQTEGMKRPVFLSSEDKEEIVNLLFKKERKVTVKQLKEEYFSKMKCFHTVTILGVEDRFNASLGTYHDLLKIFKDKAFLDDEANQDILEEIVWTLTLFEDQAMIERRLVKYADVFEKSVLKKLKKRHYTGWGRLSQKLINGIKDKQTGKTILGFLKDDGVANRNFMQLINDSSLDFAKIIKNEQEKTIKNESLEETIANLAGSPAIKKGILQSIKIVDEIVKIMGQNPDNIVIEMARENQSTMQGIKNSRQRLRKLEEVHKNTGSKILKEYNVSNTQLQSDRLYLYLLQDGKDMYTGKELDYDNLSQYDIDHIIPQSFIKDNSIDNTVLTTQASNRGKSDNVPNIETVNKMKSFWYKQLKSGAISQRKFDHLTKAERGALSDFDKAGFIKRQLVETRQITKHVAQILDSRFNSNLTEDSKSNRNVKIITLKSKMVSDFRKDFGFYKLREVNDYHHAQDAYLNAVVGTALLKKYPKLEAEFVYGDYKHYDLAKLMIQPDSSLGKATTRMFFYSNLMNFFKKEIKLADDTIFTRPQIEVNTETGEIVWDKVKDMQTIRKVMSYPQVNIVMKTEVQTGGFSKESIWPKGDSDKLIARKKSWDPKKYGGFDSPIIAYSVLVVAKIAKGKTQKLKTIKELVGIKIMEQDEFEKDPIAFLEKKGYQDIQTSSIIKLPKYSLFELENGRKRLLASAKELQKGNELALPNKYVKFLYLASHYTKFTGKEEDREKKRSYVESHLYYFDEIMQIIVEYSNRYILADSNLIKIQNLYKEKDNFSIEEQAINMLNLFTFTDLGAPSAFKFFNGDIDRKRYSSTNEIINSTLIYQSPTGLYETRIDLSKLGGK

SEQ ID NO: 116 - protein, 1273 aa, Streptococcus iniae
  misc_feature (1267)..(1267): Xaa can be any naturally occurring amino acid
MRKPYSIGLDIGTNSVGWAVITDDYKVPSKKMRIQGTTDRTSIKKNLIGALLFDNGETAEATRLKRTTRRRYTRRKYRIKELQKIFSSEMNELDIAFFPRLSESFLVSDDKEFENHPIFGNLKDEITYHNDYPTIYHLRQTLADSDQKADLRLIYLALAHIIKFRGHFLIEGNLDSENTDVHVLFLNLVNIYNNLFEEDIVETASIDAEKILTSKTSKSRRLENLIAEIPNQKRNMLFGNLVSLALGLTPNFKTNFELLEDAKLQISKDSYEEDLDNLLAQIGDQYADLFIAAKKLSDAILLSDIITVKGASTKAPLSASMVQRYEEHQQDLALLKNLVKKQIPEKYKEIFDNKEKNGYAGYIDGKTSQEEFYKYIKPILLKLDGTEKLISKLEREDFLRKQRTFDNGSIPHQIHLNELKAIIRRQEKFYPFLKENQKKIEKLFTFKIPYYVGPLANGQSSFAWLKRQSNESITPWNFEEVVDQEASARAFIERMTNFDTYLPEEKVLPKHSPLYEMFMVYNELTKVKYQTEGMKRPVFLSSEDKEEIVNLLFKKERKVTVKQLKEEYFSKMKCFHTVTILGVEDRFNASLGTYHDLLKIFKDKAFLDDEANQDILEEIVWTLTLFEDQAMIERRLVKYADVFEKSVLKKLKKRHYTGWGRLSQKLINGIKDKQTGKTILGFLKDDGVANRNFMQLINDSSLDFAKIIKNEQEKTIKNESLEETIANLAGSPAIKKGILQSIKIVDEIVKIMGQNPDNIVIEMARENQSTMQGIKNSRQRLRKLEEVHKNTGSKILKEYNVSNTQLQSDRLYLYLLQDGKDMYTGKELDYDNLSQYDIDHIIPQSFIKDNSIDNTVLTTQASNRGKSDNVPNIETVNKMKSFWYKQLKSGAISQRKFDHLTKAERGALSDFDKAGFIKRQLVETRQITKHVAQILDSRFNSNLTEDSKSNRNVKIITLKSKMVSDFRKDFGFYKLREVNDYHHAQDAYLNAVVGTALLKKYPKLEAEFVYGDYKHYDLAKLMIQPDSSLGKATTRMFFYSNLMNFFKKEIKLADDTIFTRPQIEVNTETGEIVWDKVKDMQTIRKVMSYPQVNIVMKTEVQTGGFSKESIWPKGDSDKLIARKKSWDPKKYGGFDSPIIAYSVLVVAKIAKGKTQKLKTIKELVGIKIMEQDEFEKDPIAFLEKKGYQDIQTSSIIKLPKYSLFELENGRKRLLASAKELQKGNELALPNKYVKFLYLASHYTKFTGKEEDREKKRSYVESHLYYFXEVKSSF

SEQ ID NO: 117 - protein, 1267 aa, Streptococcus iniae
  misc_feature (1265)..(1265): Xaa can be any naturally occurring amino acid
  misc_feature (1267)..(1267): Xaa can be any naturally occurring amino acid
MRKPYSIGLDIGTNSVGWAVITDDYKVPSKKMRIQGTTDRTSIKKNLIGALLFDNGETAEATRLKRTTRRRYTRRKYRIKELQKIFSSEMNELDIAFFPRLSESFLVSDDKEFENHPIFGNLKDEITYHNDYPTIYHLRQTLADSDQKADLRLIYLALAHIIKFRGHFLIEGNLDSENTDVHVLFLNLVNIYNNLFEEDIVETASIDAEKILTSKTSKSRRLENLIAEIPNQKRNMLFGNLVSLALGLTPNFKTNFELLEDAKLQISKDSYEEDLDNLLAQIGDQYADLFIAAKKLSDAILLSDIITVKGASTKAPLSASMVQRYEEHQQDLALLKNLVKKQIPEKYKEIFDNKEKNGYAGYIDGKTSQEEFYKYIKPILLKLDGTEKLISKLEREDFLRKQRTFDNGSIPHQIHLNELKAIIRRQEKFYPFLKENQKKIEKLFTFKIPYYVGPLANGQSSFAWLKRQSNESITPWNFEEVVDQEASARAFIERMTNFDTYLPEEKVLPKHSPLYEMFMVYNELTKVKYQTEGMKRPVFLSSEDKEEIVNLLFKKERKVTVKQLKEEYFSKMKCFHTVTILGVEDRFNASLGTYHDLLKIFKDKAFLDDEANQDILEEIVWTLTLFEDQAMIERRLVKYADVFEKSVLKKLKKRHYTGWGRLSQKLINGIKDKQTGKTILGFLKDDGVANRNFMQLINDSSLDFAKIIKNEQEKTIKNESLEETIANLAGSPAIKKGILQSIKIVDEIVKIMGQNPDNIVIEMARENQSTMQGIKNSRQRLRKLEEVHKNTGSKILKEYNVSNTQLQSDRLYLYLLQDGKDMYTGKELDYDNLSQYDIDHIIPQSFIKDNSIDNTVLTTQASNRGKSDNVPNIETVNKMKSFWYKQLKSGAISQRKFDHLTKAERGALSDFDKAGFIKRQLVETRQITKHVAQILDSRFNSNLTEDSKSNRNVKIITLKSKMVSDFRKDFGFYKLREVNDYHHAQDAYLNAVVGTALLKKYPKLEAEFVYGDYKHYDLAKLMIQPDSSLGKATTRMFFYSNLMNFFKKEIKLADDTIFTRPQIEVNTETGEIVWDKVKDMQTIRKVMSYPQVNIVMKTEVQTGGFSKESIWPKGDSDKLIARKKSWDPKKYGGFDSPIIAYSVLVVAKIAKGKTQKLKTIKELVGIKIMEQDEFEKDPIAFLEKKGYQDIQTSSIIKLPKYSLFELENGRKRLLASAKELQKGNELALPNKYVKFLYLASHYTKFTGKEEDREKKRSYVESHLYXFX

SEQ ID NO: 118 - protein, 200 aa, Streptococcus iniae IUSA1
MEQDEFEKDPIAFLEKKGYQDIQTSSIIKLPKYSLFELENGRKRLLASAKELQKGNELALPNKYVKFLYLASHYTKFTGKEEDREKKRSYVESHLYYFDEIMQIIVEYSNRYILADSNLIKIQNLYKEKDNFSIEEQAINMLNLFTFTDLGAPSAFKFFNGDIDRKRYSSTNEIINSTLIYQSPTGLYETRIDLSKLGGK

SEQ ID NO: 119 - protein, 1281 aa, Streptococcus iniae SF1
MRKPYSIGLDIGTNSVGWAVITDDYKVPSKKMRIQGTTDRTSIKKNLIGALLFDNGETAEATRLKRTTRRRYTRRKYRIKELQKIFSSEMNELDIAFFPRLSESFLVSDDKEFENHPIFGNLKDEITYHNDYPTIYHLRQTLADSDQKADLRLIYLALAHIIKFRGHFLIEGNLDSENTDVHVLFLNLVNIYNNLFEEDIVETASIDAEKILTSKTSKSRRLENLIAEIPNQKRNMLFGNLVSLALGLTPNFKTNFELLEDAKLQISKDSYEEDLDNLLAQIGDQYADLFIAAKKLSDAILLSDIITVKGASTKAPLSASMVQRYEEHQQDLALLKNLVKKQIPEKYKEIFDNKEKNGYAGYIDGKTSQEEFYKYIKPILLKLDGTEKLISKLEREDFLRKQRTFDNGSIPHQIHLNELKAIIRRQEKFYPFLKENQKKIEKLFTFKIPYYVGPLANGQSSFAWLKRQSNESITPWNFEEVVDQEASARAFIERMTNFDTYLPEEKVLPKHSPLYEMFMVYNELTKVKYQTEGMKRPVFLSSEDKEEIVNLLFKKERKVTVKQLKEEYFSKMKCFHTVTILGVEDRFNASLGTYHDLLKIFKDKAFLDDEANQDILEEIVWTLTLFEDQAMIERRLVKYADVFEKSVLKKLKKRHYTGWGRLSQKLINGIKDKQTGKTILGFLKDDGVANRNFMQLINDSSLDFAKIIKNEQEKTIKNESLEETIANLAGSPAIKKGILQSIKIVDEIVKIMGQNPDNIVIEMARENQSTMQGIKNSRQRLRKLEEVHKNTGSKILKEYNVSNTQLQSDRLYLYLLQDGKDMYTGKELDYDNLSQYDIDHIIPQSFIKDNSIDNTVLTTQASNRGKSDNVPNIETVNKMKSFWYKQLKSGAISQRKFDHLTKAERGALSDFDKAGFIKRQLVETRQITKHVAQILDSRFNSNLTEDSKSNRNVKIITLKSKMVSDFRKDFGFYKLREVNDYHHAQDAYLNAVVGTALLKKYPKLEAEFVYGDYKHYDLAKLMIQPDSSLGKATTRMFFYSNLMNFFKKEIKLADDTIFTRPQIEVNTETGEIVWDKVKDMQTIRKVMSYPQVNIVMKTEVQTGGFSKESIWPKGDSDKLIARKKSWDPKKYGGFDSPIIAYSVLVVAKIAKGKTQKLKTIKELVGIKIMEQDEFEKDPIAFLEKKGYQDIQTSSIIKLPKYSLFELENGRKRLLASAKELQKGNELALPNKYVKFLYLASHYTKFTGKEEDREKKRSYVESHLYYFDVRLSQVFRVTNVEF

SEQ ID NO: 120 - protein, 1345 aa, Streptococcus intermedius
MKKPYSIGLDIGTNSVGWAVVTDDYKVPAKKMKVLGNTDKSHIKKNLLGALLFDSGNTAEDRRLKRTARRRYTRRRNRILYLQEIFSEEMGKVDDSFFHRLEDSFLVTEDKRGERHPIFGNLEEEVKYHENFPTIYHLRQYLADNPEKTDLRLVYLALAHIIKFRGHFLIEGKFDTRNNDVQRLFQEFLAVYDNTFENSSLQEQNVQVEEILTDKISKSAKKDRVLKLFPNEKSNGRFAEFLKLIVGNQADFKKHFELEEKAPLQFSKDTYEEELEVLLAQIEDNYAELFLSAKKLYDSILLSGILTVTDVSTKAPLSASMIQRYNEHQMDLAQLKQFIRQKLSDKYNEVFSDVSKDGYAGYIDGKTNQEAFYKYLKGLLNKIEGSGYFLDKIEREDFLRKQRTFDNGSIPHQIHLQEMRAIIRRQAEFYPFLADNQDRIEKILTFRIPYYIGPLARGKSDFSWLSRKSADKITPWNFDEIVDKESSAEAFINRMTNYDLYLPNQKVLPRHSLLYEKFTVYNELTKVKYKTEQGKTAFFDANMKQEIFDGVFKVYRKVTKDKLMDFLEKEFDEFRIVDLTGLDKENKAFNASYGTYHDLRKILDKDFLDNSKNEKILEDIVLTLTLFEDREMIRKRLENYSDLLTKEQVKNLERRHYTGWGRLSAELIHGIRNKESRKTILDYLIDDGNSNRNFMQLINDDALSFKEEIAKAQVIGETDNLNQVVSDIAGSPAIKKGILQSLKIVDELVKIMGHQPENIVVEMARENQFTNQGRRNSQQRLKGLTDSIKEFGSQILKEHPVENSQLQNDRLFLYYLQNGRDMYTGEELDIDYLSQYDIDHIIPQAFIKDNSIDNRVLTSSKENRGKSDDVPSKDVVRKMKSYWSKLLSAKLITQRKFDNLTKAERGGLTDDDKAGFIKRQLVETRQITKHVARILDERFNTETDENNKKIRQVKIVTLKSNLVSNFRKEFELYKVREINDYHHAHDAYLNAVIGKALLGVYPQLEPEFVYGDYPHFHGHKENKATAKKFFYSNIMNFFKKDDVRTDKNGEIIWKKDEHISNIKKVLSYPQVNIVKKVEEQTGGFSKESILPKGNSDKLIPRKTKKFYWDTKKYGGFDSPIVAYSILVIANIEKGKSKKLKLVKDLVGITIMERTIFEKNPVAFLERKGYRNVQEENIVKLPKYSLFELENGRRRLLASARELQKGNEIVLPNHLGTMLYHAKNIHKVDEPKHLDYVKKHKDEFKELLDVVSNFSKKNILAESNLEKIEELYAQNNNKDITELASSFINLLTFTAIGAPAAFKFFDNNIDRKRYTSTTEILNATLIHQSITGLYETRIDLSRLGGD

SEQ ID NO: 121 - protein, 1353 aa, Streptococcus massiliensis
MKKPYSIGLDIGTNSVGWAVVMEDYKVPSKKMKVLGNTDKQSIKKNLIGALLFDSGETAVERRLNRTTSRRYDRRRNRIRYLQHIFAEEMNRADENFFHRLKESFFVEEDKTYSKYPIFGTLEEEKNYHKNYPTIYHLRKTLADTPDKMDIRLIYLALAHIIKYRGHFLIEGDLDIENIGIQDSFKSFIEEYNTQFGTKLDSTTKVEAIFTENSSKAKRVETILGLFPDETAAGNLDKFLKLMLGNQADFKKVFDLEEKITLQFSKDSYEEDLELLLSKIDEEYAALFDLAKKVYDAVLLSNILTVKEKNTKAPLSASMIKRYEEHKDDLKAFKRFFRERLPEKYETMFKDLTKPSYAAYVSGLYKKDAKRGLVPTSKRVTEDDFYKFSKGLLIDVEGAEYFLEKIEREDFLRKQRTFDNGAIPNQVHVKELQAIILNQSKYYPFLAENKEKIEKILTFRIPYYVGPLARGNSSFAWLQRKSDEAIRPWNFEQVVDMETSASRFIERMTLHDLYLPDEKVLPRHSLIYEKYTVFNELTKVRFTPEGGKEVYFSKTDKENIFDSLFKRYRKVTKRKLKDFIEKELGYGYIDIDNIKGVEEQFNASYTTYQDLLKIIGDKEFLDNEENKDLLEEIIYILTVFEDRKMIEKRLSELNIPFENKIIKKLARKKYTGWGNLSRKLIDGIRNRETNRTILGHLIDDGFSNRNLMQLINDDGLDFKEIIRKAQTIENIDTNQALVSSLPGSPAIKKGILQSLNIVDEIIAIMGYAPTNIVIEMARENQTTQKGRDNSAQRLKKIEDGIKLLGSDLLKQNPIQDNKDLQKEKLFLYYMQNGIDLYTGQPLNCDPDSLAFYDVDHIVPRSYIKNDSFDNKVLTTSKGNRKKLDDVPAKEVVEKMENTWRRLHAAGLISDIKLSYLMKGELTEEDKAGFIRRQLVETRQITKHVARLLDEKLNRKKNENGEKLRTTKIITLKSVFASRFRANFDLYKLRELNHYHHAHDAYLNAVVAQALLKVYPKFERELVYGSYVKESIFSRKISATERMRMYNNILKFISKDKKVDQETGEIVWDKKEIENIVKKVIYSSPVNIVKKREEQSGALFKQSNMAVGYNNKLIPRKKDWSVDKYGGFIEPAESYSLAIFYTDINGKKPKKKSTIIAISRMEKKDYEKEPERFLAQKGFERVEKTIKLPKYSLFEMEKGRRRLLASSGELQKGNQVLLPEHLIRLLSYAKKVDVLVKSKDDDYDLEEHRAEFAELLDCIKKFNDMYILASSNMSKIEEIYQKNIDAPIEEVARSFVALLNFTMMGAATDFKFFGQIIPRKRYPSTTECLKSTLIHQSVTGLYETRIDLSKLGEN

SEQ ID NO: 122 - protein, 1376 aa, Streptococcus mitis
MNNKPYSIGLDIGTNSVGWAVITDDYKVPSKKMKVLGNTDKHFIKKNLLGALLFDEGTTAEDRRLKRTARRRYTRRKNRLRYLQEIFTEEMSKVDISFFHRLDDSFLVPEDKRGSKYPIFATLEEEKEYHKNFPTIYHLRKHLADSKEKADFRLIYLALAHIIKYRGHFLYEESFDIKNNDIQKIFNEFISIYDNTFEGSSLNGQNAQVEAIFTDKISKSAKRERVLKLFPDEKSTGLFSEFLKLIVGNQADFKKHFDLEEKAPLQFSKDTYDEDLENLLVQIGDDFADLFLVAKKLYDAILLSGILTVTDPSTKAPLSASMIDRYENHQKDLAALKQFIKTNLPEKYDEVFSDQSKDGYAGYIDGKTTQEAFYKYIKNLLSKLEGADYFLDKIEREDFLRKQRTFDNGSIPHQIHLQEMNAIIRRQGEHYPFLQENKEKIEKILTFRIPYYVGPLARGNRDFAWLTRNSDQAIRPWNFEEIVDKARSAEDFINKMTNYDLYLPEEKVLPKHSLLYETFAVYNELTKVKFIAEGLRDYQFLDSGQKQQIVTQLFKEKRKVTEKDIIQYLHNVDSYDGIELKGIEKQFNASLSTYHDLLKIIKDKEFMDDSKNEAILENIVHTLTIFEDREMIKQRLAHYASIFDEKVIKALTRRHYTGWGKLSAKLINGIYDKQSKKTILDYLIDDGEINRNFMQLINDDGLSFKEIIQKAQVVGKTNDVKQVVQELPGSPAIKKGILQSIKLVDELVKVMGHAPESIVIEMARENQTTARGKKNSQQRYKRIEDALKNLAHGLDSNILKEHPTDNIQLQNDRLFLYYLQNGKDMYTGKSLDINQLSSCDIDHIIPQAFIKDDSLDNRVLTSSKDNRGKSDNVPSLEIVQKRKAFWQQLLDSKLISERKFNNLTKAERGGLDERDKVGFIKRQLVETRQITKHVAQILDARFNTEVTEKDKKDRSVKIITLKSNLVSNFRKEFRLYKVREINDYHHAHDPYLNAVVAKAILKKYPKLEPEFVYGDYQKYDLKRYISRTKDPKEVEKATEKYFFYSNLLNFFKEEVHYADGTIVKRENIEYSKDTGEIAWNKEKDFATIKKVLSLPQVNIVKKTEEQTVGQNGGLFDNNIVSKKKVVDASKLTPIKSGLSPEKYGGYARPTIAYSVLVIADIEKGKAKKLKRIKEMVGITVQDKKKFEANPIAYLEECGYKNINPNLIIKLPKYSLFEFNNGQRRLLASSIELQKGNELIVPYHFTALLYHAQRINKISEPIHKQYVETHQSEFKELLTAIISLSKKYIQKPNVESLLQQAFDQSDKDIYQLSESFISLLKLISFGAPGTFKFLGVEISQSNVRYQSVSSCFNATLIHQSITGLYETRIDLSKLGED

SEQ ID NO: 123 - protein, 1370 aa, Streptococcus mitis; identical to SEQ ID NO: 13

SEQ ID NO: 124 - protein, 1345 aa, Streptococcus mutans
MKKPYSIGLDIGTNSVGWAVVTDDYKVPAKKMKVLGNTDKSHIEKNLLGALLFDSGNTAEDRRLKRTARRRYTRRRNRILYLQEIFSEEMGKVDDSFFHRLEDSFLVTEDKRGERHPIFGNLEEEVKYHENFPTIYHLRQYLADNPEKVDLRLVYLALAHIIKFRGHFLIEGKFDTRNNDVQRLFQEFLAVYDNTFENSSLQEQNVQVEEILTDKISKSAKKDRVLKLFPNEKSNGRFAEFLKLIVGNQADFKKHFELEEKAPLQFSKDTYEEELEVLLAQIGDNYAELFLSAKKLYDSILLSGILTVTDVGTKAPLSASMIQRYNEHQMDLAQLKQFIRQKLSDKYNEVFSDVSKDGYAGYIDGKTNQEAFYKYLKGLLNKIEGSGYFLDKIEREDFLRKQRTFDNGSIPHQIHLQEMRAIIRRQAEFYPFLADNQDRIEKLLTFRIPYYVGPLARGKSDFAWLSRKSADKITPWNFDEIVDKESSAEAFINRMTNYDLYLPNQKVLPKHSLLYEKFTVYNELTKVKYKTEQGKTAFFDANMKQEIFDGVFKVYRKVTKDKLMDFLEKEFDEFRIVDLTGLDKENKVFNASYGTYHDLCKILDKDFLDNSKNEKILEDIVLTLTLFEDREMIRKRLENYSDLLTKEQVKKLERRHYTGWGRLSAELIHGIRNKESRKTILDYLIDDGNSNRNFMQLINDDALSFKEEIAKAQVIGETDNLNQVVSDIAGSPAIKKGILQSLKIVDELVKIMGHQPENIVVEMARENQFTNQGRRNSQQRLKGLTDSIKEFGSQILKEHPVENSQLQNDRLFLYYLQNGRDMYTGEELDIDYLSQYDIDHIIPQAFIKDNSIDNRVLTSSKENRGKSDDVPSKDVVRKMKSYWSKLLSAKLITQRKFDNLTKAERGGLTDDDKAGFIKRQLVETRQITKHVARILDERFNTETDENNKKIRQVKIVTLKSNLVSNFRKEFELYKVREINDYHHAHDAYLNAVIGKALLGVYPQLEPEFVYGDYPHFHGHKENKATAKKFFYSNIMNFFKKDDVRTDKNGEIIWKKDEHISNIKKVLSYPQVNIVKKVEEQTGGFSKESILPKGNSDKLIPRKTKKFYWDTKKYGGFDSPIVAYSILVIADIEKGKSKKLKTVKALVGVTIMEKMTFERDPVAFLERKGYRNVQEENIIKLPKYSLFKLENGRKRLLASARELQKGNEIVLPNHLGTLLYHAKNIHKVDEPKHLDYVDKHKDEFKELLDVVSNFSKKYTLAEGNLEKIKELYAQNNGEDLKELASSFINLLTFTAIGAPATFKFFDKNIDRKRYTSTTEILNATLIHQSITGLYETRIDLNKLGGD

SEQ ID NO: 125 - protein, 1345 aa, Streptococcus mutans
MKKPYSIGLDIGTNSVGWAVVTDDYKVPAKKMKVLGNTDKSHIEKNLLGALLFDSGNTAEDRRLKRTARRRYTRRRNRILYLQEIFSEEMGKVDDSFFHRLEDSFLVTEDKRGERHPIFGNLEEEVKYHENFPTIYHLRQYLADNPEKVDLRLVYLALAHIIKFRGHFLIEGKFDTRNNDVQRLFQEFLAVYDNTFENSSLQEQNVQVEEILTDKISKSAKKDRVLKLFPNEKSNGRFAEFLKLIVGNQADFKKHFELEEKAPLQFSKDTYEEELEVLLAQIGDNYAELFLSAKKLYDSILLSGILTVTDVGTKAPLSASMIQRYNEHQMDLAQLKQFIRQKLSDKYNEVFSDVSKDGYAGYIDGKTNQEAFYKYLKGLLNKIEGSGYFLDKIEREDFLRKQRTFDNGSIPHQIHLQEMRAIIRRQAEFYPFLADNQDRIEKLLTFRIPYYVGPLARGKSDFAWLSRKSADKITPWNFDEIVDKESSAEAFINRMTNYDLYLPNQKVLPKHSLLYEKFTVYNELIKVKYKTEQGKTAFFDANMKQEIFDGVFKVYRKVTKDKLMDFLEKEFDEFRIVDLTGLDKENKVFNASYGTYHDLCKILDKDFLDNSKNEKILEDIVLTLTLFEDREMIRKRLENYSDLLTKEQVKKLERRHYTGWGRLSAELIHGIRNKESRKTILDYLIDDGNSNRNFMQLINDDALSFKEEIAKAQVIGETDNLNQVVSDIAGSPAIKKGILQSLKIVDELVKIMGHQPENIVVEMARENQFTNQGRRNSQQRLKGLTDSIKEFGSQILKEHPVENSQLQNDRLFLYYLQNGRDMYTGEELDIDYLSQYDIDHIIPQAFIKDNSIDNRVLTSSKENRGKSDDVPSKDVVRKMKSYWSKLLSAKLITQRKFDNLTKAERGGLTDDDKAGFIKRQLVETRQITKHVARILDERFNTETDENNKKIRQVKIVTLKSNLVSNFRKEFELYKVREINDYHHAHDAYLNAVIGKALLGVYPQLEPEFVYGDYPHFHGHKENKATAKKFFYSNIMNFFKKDDVRTDKNGEIIWKKDEHISNIKKVLSYPQVNIVKKVEEQTGGFSKESILPKGNSDKLIPRKTKKFYWDTKKYGGFDSPIVAYSILVIADIEKGKSKKLKTVKALVGVTIMEKMTFERDPVAFLERKGYRNVQEENIIKLPKYSLFKLENGRKRLLASARELQKGNEIVLPNHLGTLLYHAKNIHKVDEPKHLDYVDKHKDEFKELLDVVSNFSKKYTLAEGNLEKIKELYAQNNGEDLKELASSFINLLTFTAIGAPATFKFFDKNIDRKRYTSTTEILNATLIHQSITGLYETRIDLNKLGGD

SEQ ID NO: 126 - protein, 1345 aa, Streptococcus mutans
MKKPYSIGLDIGTNSVGWAVVTDDYKVPAKKMKVLGNTDKSHIKKNLLGALLFDSGNTAEDRRLKRTARRRYTRRRNRILYLQEIFSEEMGKVDDSFFHRLDESFLTDDDKNFDSYPIFGNKAEEDAYHQKFPTIYHLRKHLADSTEKADLRLVYLALAHMIKFRGHFLIEGELNAENTDVQKLFADFVGVYDRTFDDSHLSEITVDASSILTEKISKSRRLEKLINNYPKEKKNTLFRNLVALSLGLQPNFKTNFKLSEDAKLQFSKDTYEEDLEELLGKIGDDYADLFTLAKNLYDAILLSGILTADDSSTKAPLSASMIKRYAEHHEDLEKLKEFIKANKPELYHDIFKDETKNGYAGYIENGVKQDEFYKYLKNTLSKIAGSDYFLDKIEREDFLRKQRTFDNGSIPHQIHLQEMHAILRRQGDYYPFLKENQDRIEKILTFRIPYYVGPLARGKSDFAWLSRKSADKITPWNFDEIVDKESSVEAFINRMTNYDLYLPNQKVLPKHSLLYEKFTVYNELTKVKYKTEQGKTAFFDANMKQEIFDGVFKVYRKVTKDKLMDFLEKEFDEFRIVDLTGLDKENKAFNASYGTYHDLRKILDKDFLDNSKNEKILEDIVLTLTLFEDREMIRKRLKNYSDLLTKEQLKKLERRHYTGWGRLSAELIHGIRNKESRKTILDYLIDDGNSNRNFMQLINDDALSFKEEIAKAQVIGETDNLNQVVSDIAGSPAIKKGILQSLKIVDELVKIMGHQPENIVVEMARENQFTNQGRRNSQQRLKGLTDSIKEFGSQILKEHPVENSQLQNDRLFLYYLQNGRDMYTGEELDIDYLSQYDIDHIIPQAFIKDNSIDNRVLTSSKENRGKSDDVPSKDVVRKMKSYWSKLLSAKLITQRKFDNLTKGERGGLTDDDKAGFIKRQLVETRQITKHVARILDERFNTETDENNKKIRQVKIVTLKSNLVSNFRKEFELYKVREINDYHHAHDAYLNAVIGKALLGVYPQLEPEFVYGDYPHFHGHKENKATAKKFFYSNIMNFFKKDDVRTDKNGEIIWKKDEYISNIKKVLSYPQVNIVKKVEEQTGGFSKESILPKGDSDKLIPRKTKKFYWDTKKYGGFDSPIVAYSILVIADIEKGKSKKLKTVKALVGVTIMEKMTFERDPVAFLERKGYRNVQEENIIKLPKYSLFKLENGRKRLLASARELQKGNEIVLPNHLGTLLYHAKNIHKVDEPKHLDYVDKHKDEFKELLDVVSNFSKKYTLAEGNLEKIKELYAQNNGEDLKELASSFINLLTFTAIGAPATFKFFDKNIDRKRYTSTTEILNATLIHQSITGLYETRIDLSKLGGD

SEQ ID NO: 127 - protein, 1345 aa, Streptococcus mutans
MKKPYSIGLDIGTNSVGWAVVTDDYKVPAKKMKVLGNTDKSHIKKNLLGALLFDSGNTAEDRRLKRTARRRYTRRRNRILYLQEIFSEEMGKVDDSFFHRLEDSFLVTEDKRGERHPIFGNLEEEVKYHENFPTIYHLRQYLADNPEKTDLRLVYLALAHIIKFRGHFLIEGKFDTRNNDVQRLFQEFLAVYDNTFENSSLQEQNVQVEEILTDKISKSAKKDRVLKLFPNEKSNGRFAEFLKLIVGNQADFKKHFELEEKAPLQFSKDIYEEELEVLLAQIGDNYAELFLSAKKLYDSILLSGILTVTDVSTKAPLSASMIQRYNEHQMDLAQLKQFIRQKLSDKYNEVFSDVSKDGYAGYIDGKTNQEAFYKYLKGLLNKIEGSGYFLDKIEREDFLRKQRTFDNGSIPHQIHLQEMRAIIRRQAEFYPFLADNQDRIEKILTFRIPYYVGPLARGKSDFAWLSRKSADKITPWNFDEIVDKESSVEAFINRMTNYDLYLPNQKVLPKHSLLYEKFTVYNELTKVKYKTEQGKTAFFDANMKQEIFDGVFKVYRKVTKDKLMDFLEKEFDEFRIVDLTGLDKENKAFNASYGTYHDLRKILDKDFLDNSKNEKILEDIVLTLTLFEDREMIRKRLKNYSDLLTKEQLKKLERRHYTGWGRLSAELIHGIRNKESRKTILDYLIDDGNSNRNFMQLINDDALSFKEEIAKAQVIGETDNLNQVVSDIAGSPAIKKGILQSLKIVDELVKIMGHQPENIVVEMARENQFTNQGRRNSQQRLKGLTDSIKEFGSQILKEHPVENSQLQNDRLFLYYLQNGRDMYTGEELDIDYLSQYDIDHIIPQAFIKDNSIDNRVLTSSKENRGKSDDVPSKDVVRKMKSYWSKLLSAKLITQRKFDNLTKAERGGLTDDDKAGFIKRQLVETRQITKHVARILDERFNTETDENNKKIRQVKIVTLKSNLVSNFRKEFELYKVREINDYHHAHDAYLNAVIGKALLGVYPQLEPEFVYGDYPHFHGHKENKATAKKFFYSNIMNFFKKDDVRTDKNGEIIWKKDEHISNIKKVLSYPQVNIVKKVEEQTGGFSKESILPKGNSDKLIPRKTKKFYWDTKKYGGFDSPIVAYSILVIADIEKGKSKKLKTVKALVGVTIMEKMTFERDPVAFLERKGYRNVQEENIIKLPKYSLFKLENGRKRLLASARELQKGNEIVLPNHLGTLLYHAKNIHKVDEPKHLDYVDKHKDEFKELLDVVSNFSKKYTLAEGNLEKIKELYAQNNGEDLKELASSFINLLTFTAIGAPATFKFFDKNIDRKRYTSTTEILNATLIHQSITGLYETRIDLNKLGGD

SEQ ID NO: 128 - protein, 1345 aa, Streptococcus mutans
MKKPYSIGLDIGTNSVGWAVVTDDYKVPAKKMKVLGNTDKSHIKKNLLGALLFDSGNTAEDRRLKRTARRRYTRRRNRILYLQEIFSEEMGKVDDSFFHRLEDSFLVTEDKRGERHPIFGNLEEEVKYHENFPTIYHLRQYLADNPEKVDLRLVYLALAHIIKFRGHFLIEGKFDTRNNDVQRLFQEFLAVYDNTFENSSLQEQNVQVEEILTDKISKSAKKDRVLKLFPNEKSNGRFAEFLKLIVGNQADFKKHFELEEKAPLQFSKDTYEEELEVLLAQIGDNYAELFLSAKKLYDSILLSGILTVTDVSTKAPLSASMIQRYNEHQMDLAQLKQFIRQKLSDKYNEVFSDVSKDGYAGYIDGKTNQEAFYKYLKGLLNKIEGSGYFLDKIEREDFLRKQRTFDNGSIPHQIHLQEMRAIIRRQAEFYPFLADNQDRIEKILTFRIPYYVGPLARGKSDFAWLSRKSADKITPWNFDEIVDKESSAEAFINRMTNYDLYLPNQKVLPKHSLLYEKFTVYNELTKVKYKTEQGKTAFFDANMKQEIFDGVFKVYRKVTKDKLMDFLEKEFDEFRIVDLTGLDKENKVFNASYGTYHDLCKILDKDFLDNSKNEKILEDIVLTLTLFEDREMIRKRLENYSDLLTKEQVKKLERRHYTGWGRLSAELIHGIRNKESRKTILDYLIDDGNSNRNFMQLINDDALSFKEEIAKAQVIGETDNLNQVVSDIAGSPAIKKGILQSLKIVDELVKIMGHQPENIVVEMARENQFTNQGRQNSQQRLKGLTDSIKEFGSQILKEHPVENSQLQNDRLFLYYLQNGRDMYTGEELDIDYLSQYDIDHIIPQAFIKDNSIDNRVLTSSKENRGKSDDVPSEDVVRKMKSYWSKLLSAKLITQRKFDNLTKAERGGLTDDDKAGFIKRQLVETRQITKHVARILDERFYTETDENNKKIRQVKIVTLKSNLVSNFRKEFELYKVREINDYHHAHDAYLNAVIGKALLGVYPQLEPEFVYGDYPHFHGHKENKATAKKFFYSNIMNFFKKDDVRTDKNGEIIWKKDEHISNIKKVLSYPQVNIVKKVEEQTGGFSKESILPKGNSDKLIPRKTKKFYWDTKKYGGFDSPIVAYSILVIADIEKGKSKKLKTVKALVGVTIMEKMTFERDPVAFLERKGYRNVQEENIIKLPKYSLFKLENGRKRLLASARELQKGNEIVLPNHLGTLLYHAKNIHKVDEPKHLDYVDKHKDEFKELLDVVSNFSKKYTLAEGNLEKIKELYAQNNGEDLKELASSFINLLTFTAIGAPATFKFFDKNIDRKRYTSTTEILNATLIHQSITGLYETRIDLSKLGGD

SEQ ID NO: 129 - protein, 1345 aa, Streptococcus mutans
MKKPYSIGLDIGTNSVGWAVVTDDYKVPAKKMKVLGNTDKSHIKKNLLGALLFDSGNTAEDRRLKRTARRRYTRRRNRILYLQEIFSEEMGKVDDSFFHRLEDSFLVTEDKRGERHPIFGNLEEEVKYHENFPTIYHLRQYLADNPEKVDLRLVYLALAHIIKFRGHFLIEGKFDTRNNDVQRLFQEFLAVYDNTFENSSLQEQNVQVEEILTDKISKSAKKDRVLKLFPNEKSNGRFAEFLKLIVGNQADFKKHFELEEKAPLQFSKDTYEEDLEELLGKIGDDYADLFTLAKNLYDAILLSGILTADDSSTKAPLSASMIQRYNEHQMDLAQLKQFIRQKLSDKYNEVFSDVSKDGYAGYIDGKTNQEAFYKYLKGLLNKIEGSGYFLDKIEREDFLRKQRTFDNGSIPHQIHLQEMRAIIRRQAEFYPFLADNQDRIEKILTFRIPYYVGPLARGKSDFAWLSRKSADKITPWNFDEIVDKESSAEAFINRMTNYDLYLPNQKVLPKHSLLYEKFTVYNELTKVKYKTEQGKTAFFDANMKQEIFDGVFKVYRKVTKDKLMDFLEKEFDEFRIVDLTGLDKENKVFNASYGTYHDLCKILDKDFLDNSKNEKILEDIVLTLTLFEDREMIRKRLENYSDLLTKEQVKKLERRHYTGWGRLSAELIHGIRNKESRKTILDYLIDDGNSNRNFMQLINDDALSFKEEIAKAQVIGETDNLNQVVSDIAGSPAIKKGILQSLKIVDELVKIMGHQPENIVVEMARENQFTNQGRRNSQQRLKGLTDSIKEFGSQILKEHPVENSQLQNDRLFLYYLQNGRDMYTGEELDIDYLSQYDIDHIIPQAFIKDNSIDNRVLTSSKENRGKSDDVPSKDVVRKMKSYWSKLLSAKLITQRKFDNLTKAERGGLTDDDKAGFIKRQLVETRQITKHVARILDERFYTETDENNKKIRQVKIVTLKSNLVSNFRKEFELYKVREINDYHHAHDAYLNAVIGKALLGVYPQLEPEFVYGDYPHFHGHKENKATAKKFFYSNIMNFFKKDDVRTDKNGEIIWKKDEHISNIKKVLSYPQVNIVKKVEEQTGGFSKESILPKGNSDKLIPRKTKKFYWDTKKYGGFDSPIVAYSILVIADIEKGKSKKLKTVKALVGVTIMEKMTFERDPVAFLERKGYRNVQEENIIKLPKYSLFKLENGRKRLLASARELQKGNEIVLPNHLGTLLYHAKNIHKVDEPKHLDYVDKHKDEFKELLDVVSNFSKKYTLAEGNLEKIKELYAQNNGEDLKELASSFINLLTFTAIGAPATFKFFDKNIDRKRYTSTTEILNATLIHQSITGLYETRIDLSKLGGD

SEQ ID NO: 130 - protein, 1345 aa, Streptococcus mutans
MKKPYSIGLDIGTNSVGWAVVTDDYKVPAKKMKVLGNTDKSHIKKNLLGALLFDSGNTAEDRRLKRTARRRYTRRRNRILYLQEIFSEEMGKVDDSFFHRLEDSFLVTEDKRGERHPIFGNLEEEVKYHENFPTIYHLRQYLADNPEKVDLRLVYLALAHIIKFRGHFLIEGKFDTRNNDVQRLFQEFLAVYDNTFENSSLQEQNVQVEEILTDKISKSAKKDRVLKLFPNEKSNGRFAEFLKLIVGNQADFKKHFELEEKAPLQFSKDTYEEDLEELLGKIGDDYADLFTLAKNLYDAILLSGILTADDSSTKAPLSASMIQRYNEHQMDLAQLKQFIRQKLSDKYNEVFSDVSKDGYAGYIDGKTNQEAFYKYLKGLLNKIEGSGYFLDKIEREDFLRKQRTFDNGSIPHQIHLQEMRAIIRRQAEFYPFLADNQDRIEKILTFRIPYYVGPLARGKSDFAWLSRKSADKITPWNFDEIVDKESSAEAFINRMTNYDLYLPNQKVLPKHSLLYEKFTVYNELTKVKYKTEQGKTAFFDANMKQEIFDGVFKVYRKVTKDKLMDFLEKEFDEFRIVDLTGLDKENKVFNASYGTYHDLCKILDKDFLDNSKNEKILEDIVLTLTLFEDREMIRKRLENYSDLLTKEQVKKLERRHYTGWGRLSAELIHGIRNKESRKTILDYLIDDGNSNRNFMQLINDDALSFKEEIAKAQVIGETDNLNQVVSDIAGSPAIKKGILQSLKIVDELVKIMGHQPENIVVEMARENQFTNQGRRNSQQRLKGLTDSIKEFGSQILKEHPVENSQLQNDRLFLYYLQNGRDMYTGEELDIDYLSQYDIDHIIPQAFIKDNSIDNRVLTSSKENRGKSDDVPSKDVVRKMKPYWSKLLSAKLITQRKFDNLTKAERGGLTDDDKAGFIKRQLVETRQITKHVARILDERFNTETDENNKKIRQVKIVTLKSNLVSNFRKEFELYKVREINDYHHAHDAYLNAVIGKALLGVYPQLEPEFVYGDYPHFHGHEENKATAKKFFYSNIMNFFKKDDVRTDKNGEIIWKKDEHISNIKKVLSYPQVNIVKKVEEQTGGFSKESILPKGNSDKLIPRKTKKFYWDTKKYGGFDSPIVAYSILVIADIEKGKSKKLKTVKALVGVTIMEKMTFERDPVAFLERKGYRNVQEENIIKLPKYSLFKLENGRKRLLASARELQKGNEIVLPNHLGTLLYHAKNIHKVDEPKHLDYVDKHKDEFKELLDVVSNFSKKYTLAEGNLEKIKELYAQNNGEDLKELASSFINLLTFTAIGAPATFKFFDKNIDRKRYTSTTEILNATLIHQSITGLYETRIDLSKLGGD

SEQ ID NO: 131 - protein, 1345 aa, Streptococcus mutans
MKKPYSIGLDIGTNSVGWAVVTDDYKVPAKKMKVLGNTDKSHIKKNLLGALLFDSGNTAEDRRLKRTARRRYTRRRNRILYLQEIFSEEMGKVDDSFFHRLEDSFLVTEDKRGERHPIFGNLEEEVKYHENFPTIYHLRQYLADNPEKVDLRLVYLALAHIIKFRGHFLIEGKFDTRNNDVQRLFQEFLAVYDNTFENSSLQEQNVQVEEILTDKISKSAKKDRVLKLFPNEKSNGRFAEFLKLIVGNQADFKKHFELEEKAPLQFSKDTYEEELEVLLAQIGDNYAELFLSAKKLYDSILLSGILTVTDVSTKAPLSASMIQRYNEHQMDLAQLKQFIRQKLSDKYNEVFSDVSKDGYAGYIDGKTNQEAFYKYLKGLLNKIEGSGYFLDKIEREDFLRKQRTFDNGSIPHQIHLQEMRAIIRRQAEFYPFLADNQDRIEKILTFRIPYYVGPLARGKSDFAWLSRKSADKITPWNFDEIVDKESSAEAFINRMTNYDLYLPNQKVLPKHSLLYEKFTVYNELTKVKYKTEQGKTAFFDANMKQEIFDGVFKVYRKVTKDKLMDFLEKEFDEFRIVDLTGLDKENKVFNASYGTYHDLCKILDKDFLDNSKNEKILEDIVLTLTLFEDREMIRKRLENYSDLLTKEQVKKLERRHYTGWGRLSAELIHGIRNKESRKTILDYLIDDGNSNRNFMQLINDDALSFKEEIAKAQVIGETDNLNQVVSDIAGSPAIKKGILQSLKIVDELVKIMGHQPENIVVEMARENQFTKQGRRNSQQRLKGLTDSIKEFGSQILKEHPVENSQLQNDRLFLYYLQNGRDMYTGEELDIDYLSQYDIDHIIPQAFIKDNSIDNRVLTSSKENRGKSDDVPSKDVVRKMKSYWSKLLSAKLITQRKFDNLTKAERGGLTDDDKAGFIKRQLVETRQITKHVARILDERFYTETDENNKKIRQVKIVTLKSNLVSNFRKEFELYKVREINDYHHAHDAYLNAVIGKALLGVYPQLEPEFVYGDYPHFHGHKENKATAKKFFYSNIMNFFKKDDVRTDKNGEIIWKKDEHISNIKKVLSYPQVNIVKKVEEQTGGFSKESILPKGNSDKLIPRKTKKFYWDTKKYGGFDSPIVAYSILVIADIEKGKSKKLKTVKALVGVTIMEKMTFERDPVAFLERKGYRNVQEENIIKLPKYSLFKLENGRKRLLASARELQKGNEIVLPNHLGTLLYHAKNIHKVDEPKHLDYVDKHKDEFKELLDVVSNFSKKYTLAEGNLEKIKELYAQNNGEDLKELASSFINLLTFTAIGAPATFKFFDKNIDRKRYTSTTEILNATLIHQSITGLYETRIDLSKLGGD

SEQ ID NO: 132 - protein, 1345 aa, Streptococcus mutans
MKKPYSIGLDIGTNSVGWAVVTDDYKVPAKKMKVLGNTDKSHIKKNLLGALLFDSGNTAADRRLKRTARRRYTRRRNRILYLQEIFAEEMSKVDDSFFHRLEDSFLVTEDKRGERHPIFGNLEEEVKYHENFPTIYHLRQYLADNPEKVDLRLVYLALAHIIKFRGHFLIEGKFDTRNNDVQRLFQEFLAVYDNTFENSSLQEQNVQVEEILTDKISKSAKKDRVLKLFPNEKSNGRFAEFLKLIVGNQADFKKHFELEEKAPLQFSKDTYEEELEVLLTQIGDNYAELFLSAKKLYDSILLSGILTVTDVSTKAPLSASMIQRYNEHQMDLAQLKQFIRQKLSDKYNEVFSDVSKDGYAGYIDGKTNQEAFYKYLKGLLNKIEGSGYFLDKIEREDFLRKQRTFDNGSIPHQIHLQEMRAIIRRQAEFYPFLADNQDRIEKILTFRIPYYVGPLARGKSDFAWLSRKSADKITPWNFDEIVDKESSAEAFINRMTNYDLYLPNQKVLPKHSLLYEKFTVYNELTKVKYKTEQGKTAFFDANMKQEIFDGVFKVYRKVTKDKLMDFLEKEFDEFRIVDLTGLDKENKAFNASYGTYHDLRKILDKDFLDNSKNEKILEDIVLTLTLFEDREMIRKRLENYSDLLTKEQVKKLERRHYTGWGRLSAELIHGIRNKESRKTLLDYLIDDGNSNRNFMQLINDDALSFKEEIAKAQVIGETDNLNQVVSDIAGSPAIKKGILQSLKIVDELVKIMGHQPENIVVEMARENQFTNQGRRNSQQRLKGLTDSIKEFGSQILKEHPVENSQLQNDRLFLYYLQNGRDMYTGEELDIDYLSQYDIDHIIPQAFIKDNSIDNRVLTSSKENRGKSDDVPSKDVVRKMKPYWSKLLSAKLITQRKFDNLTKAERGGLTDDDKAGFIKRQLVETRQITKHVARILDERFNTETDENNKKIRQVKIVTLKSNLVSNFRKEFELYKVREINDYHHAHDAYLNAVIGKALLGVYPQLEPEFVYGDYPHFHGHEENKATAKKFFYSNIMNFFKKDDVRTDKNGEIIWKKDEHISNIKKVLSYPQVNIVKKVEEQTGGFSKESILPKGNSDKLIPRKTKKFYWDTKKYGGFDSPIVAYSILVIADIEKGKSKKLKTVKALVGVTIMEKMTFERDPVAFLERKGYRNVQEENIIKLPKYSLFKLENGRKRLLASARELQKGNEIVLPNHLGTLLYHAKNIHKVDEPKHLDYVDKHKDEFKELLDVVSNFSKKYTLAEGNLEKIKELYAQNNGEDLKELSSSFINLLTFTAIGAPAAFKFFDKNIDRKRYTSTTEILNATLIHQSITGLYETRIDLSKLGGD

SEQ ID NO: 133 - protein, 1345 aa, Streptococcus mutans
MKKPYSIGLDIGTNSVGWAVVTDDYKVPAKKMKVLGNTDKSHIKKNLLGALLFDSGNTAEDRRLKRTARRRYTRRRNRILYLQEIFSEEMGKVDDSFFHRLEDSFLVTEDKRGERHPIFGNLEEEVKYHENFPTIYHLRQYLADNPEKVDLRLVYLALAHIIKFRGHFLIEGKFDTRNNDVQRLFQEFLAVYDNTFENSSLQEQNVQVEEILTDKISKSAKKDRVLKLFPNEKSNGRFAEFLKLIVGNQADFKKHFELEEKAPLQFSKDTYEEELEVLLAQIGDNYAELFLSAKKLYDSILLSGILTVTDVSTKAPLSASMIQRYNEHQMDLAQLKQFIRQKLSDKYNEVFSDVSKDGYAGYIDGKTNQEAFYKYLKGLLNKIEGSGYFLDKIEREDFLRKQRTFDNGSIPHQIHLQEMRAIIRRQAEFYPFLADNQDRIEKILTFRIPYYVGPLARGKSDFAWLSRKSADKITPWNFDEIVDKESSAEAFINRMTNYDLYLPNQKVLPKHSLLYEKFTVYNELTKVKYKTEQGKTAFFDANMKQEIFDGVFKVYRKVTKDKLMDFLEKEFDEFRIVDLTGLDKENKVFNASYGTYHDLCKILDKDFLDNSKNEKILEDIVLTLTLFEDREMIRKRLENYSDLLTKEQVKKLERRHYTGWGRLSAELIHGIRNKESRKTILDYLIDDGNSNRNFMQLINDDALSFKEEIAKAQVIGETDNLNQVVSDIAGSPAIKKGILQSLKIVDELVKIMGHQPENIVVEMARENQFTKQGRRNSQQRLKGLTDSIKEFGSQILKEHPVENSQLQNDRLFLYYLQNGRDMYTGEELDIDYLSQYDIDHIIPQAFIKDNSIDNRVLTSSKENRGKSDDVPSKDVVRKMKSYWSKLLSAKLITQRKFDNLTKAERGGLTDDDKAGFIKRQLVETRQITKHVARILDERFYTETDENNKKIRQVKIVTLKSNLVSNFRKEFELYKVREINDYHHAHDAYLNAVIGKALLGVYPQLEPEFVYGDYPHFHGHKENKATAKKFFYSNIMNFFKKDDVRTDRNGEIIWKKDEHISNIKKVLSYPQVNIVKKVEEQTGGFSKESILPKGNSDKLIPRKTKKFYWDTKKYGGFDSPIVAYSILVIADIEKGKSKKLKTVKALVGVTIMEKMTFERDPVAFLERKGYRNVQEENIIKLPKYSLFKLENGRKRLLASARELQKGNEIVLPNHLGTLLYHAKNIHKVDEPKHLDYVDKHKDEFKELLDVVSNFSKKYTLAEGNLEKIKELYAQNNGEDLKELASSFINLLTFTAIGAPATFKFFDKNIDRKRYTSTTEILNATLIHQSITGLYETRIDLSKLGGD

SEQ ID NO: 134 - protein, 1355 aa, Streptococcus mutans
MKKSYSIGLDIGTNSVGWAVVTDDYKVPAKKMKVLGNTDKSHIKKNLLGALLFDSGNTAEDRRLKRTARRRYTRRRNRILYLQEIFSEEMGKVDDSFFHRLDESFLTDDDKNFDSHPIFGNKAEEDAYHQKFPTIYHLRKHLADSTEKADLRLVYLALAHMIKFRGHFLIEGELNAENTDVQKLFADFVGVYDRTFDDSHLSEITVDASSILTEKISKSRRLEKLINNYPKEKKNTLFGNLIALSLGLQPNFKTNFKLSEDAKLQFSKDTYEEDLEELLGKIGDDYADLFTLAKNLYDAILLSGILTADDSSTKAPLSASMIKRYAEHHEDLEKLKEFIKANKPELYHDIFKDETKNGYAGYIENGVKQDEFYKYLKNTLSKIAGSDYFLDKIEREDFLRKQRTFDNGSIPHQIHLQEMHAILRRQGDYYPFLKENQDRIEKILTFRIPYYVGPLARKNSRFAWAEYHSDEAVMPWNFDQVIDKESSAQAFIEHMTNNDLYLPNEKVLPKHSPLYEKYTVYNELTKIKYVTEIGEAKFFDANLKQEIFDGLFKHERKVTKKKLRTFLDKNFDEFRIVDIQGLDKETETFNASYATYQDLLKVIKDKVFMDNPENAEILENIVLTLTLFEDREMIKQRLAKYADVFDKKVIDQLARRHYTGWGRLSAKLLNGIRDKQSCKTIMDYLIDDAQSNRNLMQLITDDNLTFKDDIVKAQYVDNSDDLHQVVQSLAGSPAIKKGILQSLKIVDELVKVMGKEPEQIVVEMARENQTTAKGRRNSQQRYKRLKEAIKSLDRDLNHKILKEHPTDNQALQNNRLFLYYLQNGRDMYTGESLDINRLSDYDIDHVIPQAFIKDNSIDNRVLTSSKANRGKSDDVPSEDVVNRMRPFWNKLLSSGLISQRKYNNLTKKELTPDDKAGFIKRQLVETRQITKHVARMLDERFNKEFDDNNKRIRRVKIVTLKSNLVSSFRKEFELYKVREINDYHHAHDAYLNAVVVKALLVKYPKLEPEFVYGEYPKYNSYRERKTATQKMFFYSNIMNMFKSKVKLADDQIVERPMIEVNDETGEIAWDKTKHITTVKKVLSYPQVNIVKKVEEQTIGQNGGLFDDNPKSPLEVIPSKLVPLKKALNPEKYGGYQKPTTAYPILLIVDTKQLIPISVMDKKRFEQNPVKFLKDKGYQQIEKNNFVKLPKYTLVDIGNGIKRLWASSKEVHKGNQLVVSKKSQDLLYHAHHLDNDYSNEYVKNHYQQFDILFNEITSFSKKCKLGKEHIQKIEEAYSKERDSASIEELADGFIKLLGFTQLGATSPFSFLGIKLNQKQYTGKKDYLLPCMEATLIHQSITGLYETRIDLNKLGGD

SEQ ID NO: 135 - protein, 1345 aa, Streptococcus mutans
MKKPYSIGLDIGTNSVGWAVVTDDYKVPAKKMKVLGNTDKSHIKKNLLGALLFDSGNTAADRRLKRTARRRYTRRRNRILYLQEIFAEEMSKVDDSFFHRLEDSFLVTEDKRGERHPIFGNLEEEVKYHENFPTIYHLRQYLADNPEKVDLRLVYLALAHIIKFRGHFLIEGKFDTRNNDVQRLFQEFLAVYDNTFENSSLQEQNVQVEEILTDKISKSAKKDRVLKLFPNEKSNGRFAEFLKLIVGNQADFKKHFELEEKAPLQFSKDTYEEELEVLLAQIGDNYAELFLSAKKLYDSILLSGILTVTDVSTKAPLSASMIQRYNEHQMDLAQLKQFIRQKLSDKYNEVFSDVSKDGYAGYIDGKTNQEAFYKYLKGLLNKIEGSGYFLDKIEREDFLRKQRTFDNGSIPHQIHLQEMRAIIRRQAEFYPFLADNQDRIEKILTFRIPYYVGPLARGKSDFAWLSRKSADKITPWNFDEIVDKESSAEAFINRMTNYDLYLPNQKVLPKHSLLYEKFTVYNELTKVKYKTEQGKTAFFDANMKQEIFDGVFKVYRKVTKDKLMDFLEKEFDEFRIVDLTGLDKENKAFNASYGTYHDLRKILDKDFLDNSKNEKILEDIVLTLTLFEDREMIRKRLENYSDLLTKEQVKKLERRHYTGWGRLSAELIHGIRNKESRKTILDYLIDDGNSNRNFMQLINDDALSFKEEIAKAQVIGETDNLNQVVSDIAGSPAIKKGILQSLKIVDELVKIMGHQPENIVVEMARENQFTNQGRRNSQQRLKGLTDSIKEFGSQILKEHPVEHSQLQNDRLFLYYLQNGRDMYTGEELDIDYLSQYDIDHIIPQAFIKDNSIDNRVLTSSKENRGKSDDVPSKNVVRKMKSYWSKLLSAKLITQRKFDNLTKAERGGLTDDDKAGFIKRQLVETRQITKHVARILDERFHTETDENNKKIRQVKIVTLKSNLVSNFRKEFELYKVREINDYHHAHDAYLNAVIGKALLGVYPQLEPEFVYGDYPHFHGHKENKATAKKFFYSNIMNFFKKDDVRTDKNGEIIWKKDEHISNIKKVLSYPQVNIVKKVEEQTGGFSKESILPKGNSDKLIPRKTKKFYWDTKKYGGFDSPIVAYSILVIADIEKGKSKKLKTVKALVGVTIMEKMTFERDPVAFLERKGYRNVQEENIIKLPKYSLFKLENGRKRLLASARELQKGNEIVLPNHLGTLLYHAKNIHKVDEPKHLDYVDKHKDEFKELLDVVSNFSKKYTLAEGNLEKIKELYAQNNGEDLKELASSFINLLTFTAIGAPATFKFFDKNIDRKRYTSTTEILNATLIHQSITGLYETRIDLSKLGGD

SEQ ID NO: 136 - protein, 1345 aa, Streptococcus mutans
MKKPYSIGLDIGTNSVGWAVVTDDYKVPAKKMKVLGNTDKSHIEKNLLGALLFDSGNTAEDRRLKRTARRRYTRRRNRILYLQEIFSEEMGKVDDSFFHRLEDFFLVTEDKRGERHPIFGNLEEEVKYHENFPTIYHLRQYLADNPEKVDLRLVYLALAHIIKFRGHFLIEGKFDTRNNDVQRLFQEFLAVYDNTFENSSLQEQNVQVEEILTDKISKSAKKDRVLKLFPNEKSNGRFAEFLKLIVGNQADFKKHFELEEKAPLQFSKDTYEEELEVLLAQIGDNYAELFLSAKKLYDSILLSGILTADDSSTKAPLSASMIQRYNEHQMDLAQLKQFIRQKLSDKYNEVFSDVSKDGYAGYIDGKTNQEAFYKYLKGLLNKIEGSGYFLDKIEREDFLRKQRTFDNGSIPHQIHLQEMRAIIRRQSEFYPFLADNQDRIEKILTFRIPYYVGPLARGKSDFAWLSRKSADKITPWNFDEIVDKESSAEAFINRMTNYDLYLPNQKVLPKHSLLYEKFTVYNELTKVKYKTEQGETAFFDANMKQEIFDGVFKVYRKVTKDKLMDFLEKEFDEFRIVDLTGLDKENKAFNASYGTYHDLRKILDKDFLDNSKNEKILEDIVLTLTLFEDREMIRKRLKNYSDLLTKEQLKKLERRHYTGWGRLSAELIHGIRNKESRKTILDYLIDDGNSNRNFMQLINDDALSFKEEIAKAQVIGETDNLNQVVSDIAGSPAIKKGILQSLKIVDELVKIMGHQPENIVVEMARENQFTNQGRRNSQQRLKGLTDSIKEFGSQILKEHPVENSQLQNDRLFLYYLQNGRDMYTGEELDIDYLSQYDIDHIIPQAFIKDNSIDNRVLTSSKENRGKSDDVPSKDVVRKMKPYWSKLLSAKLITQRKFDNLTKAERGGLTDDDKAGFIKRQLVETRQITKHVARILDERFNTETDENNKKIRQVKIVTLKSNLVSNFRKEFELYKVREINDYHHAHDAYLNAVIGKALLGVYPQLEPEFVYGDYPHFHGHEENKATAKKFFYSNIMNFFKKDDVRTDKNGEIIWKKDEHISNIKKVLSYPQVNIVKKVEEQTGGFSKESILPKGNSDKLIPRKTKKFYWDTKKYGGFDSPIVAYSILVIADIEKGKSKKLKTVKALVGVTIMEKMTFERDPVAFLERKGYRNVQEENIIKLPKYSLFKLENGRKRLLASARELQKGNEIVLPNHLGTLLYHAKNIHKVDEPKHLDYVDKHKDEFKELLDVVSNFSKKYTLAEGNLEKIKELYAQNNGEDLKELASSFINLLTFTAIGAPATFKFFDKNIDRKRYTSTTEILNATLIHQSITGLYETRIDLSKLGGD

SEQ ID NO: 137 - protein, 1345 aa, Streptococcus mutans
MKKPYSIGLDIGTNSVGWAVVTDDYKVPAKKMKVLGNTDKSHIKKNLLGALLFDSGNTAEDRRLKRTARRRYTRRRNRILYLQEIFSEEMGKVDDSFFHRLDESFLTDDDKNFDSHPIFGNKAEEDAYHQKFPTIYHLRKHLADSTEKADLRLVYLALAHMIKFRGHFLIEGELNAENTDVQKLFADFVGVYDRTFDDSHLSEITVDASSILTEKISKSRRLEKLINNYPKEKKNTLFGNLIALSLGLQPNFKTNFKLSEDAKLQFSKDTYEEELEVLLAQIGDNYAELFLSAKKLYDSILLSGILTVTDVSTKAPLSASMIQRYNEHQMDLAQLKQFIRQKLSDKYNEVFSDVSKDGYAGYIDGKTNQEAFYKYLKGLLNKIEGSGYFLDKIEREDFLRKQRTFDNGSIPHQIHLQEMRAIIRRQAEFYPFLADNQDRIEKILTFRIPYYVGPLARGKSDFAWLSRKSADKITPWNFDEIVDKESSVEAFINRMTNYDLYLPNQKVLPKHSLLYEKFTVYNELTKVKYKTEQGKTAFFDANMKQEIFDGVFKVYRKVTKDKLMDFLEKEFDEFRIVDLTGLDKENKAFNASYGTYHDLRKILDKDFLDNSKNEKILEDIVLTLTLFEDREMIRKRLKNYSDLLTKEQLKKLERRHYTGWGRLSAELIHGIRNKESRKTILDYLIDDGNSNRNFMQLINDDALSFKEEIAKAQVIGETDNLNQVVSDIAGSPAIKKGILQSLKIVDELVKIMGHQPENIVVEMARENQFTNQGRRNSQQRLKGLTDSIKEFGSQILKEHPVENSQLQNDRLFLYYLQNGRDMYTGEELDIDYLSQYDIDHIIPQAFIKDNSIDNRVLTSSKENRGKSDDVPSKDVVRKMKSYWSKLLSAKLITQRKFDNLTKGERGGLTDDDKAGFIKRQLVETRQITKHVARILDERFNTETDENNKKIRQVKIVTLKSNLVSNFRKEFELYKVREINDYHHAHDAYLNAVIGKALLGVYPQLEPEFVYGDYPHFHGHKENKATAKKFFYSNIMNFFKKDDVRTDKNGEIIWKKDEYISNIKKVLSYPQVNIVKKVEEQTGGFSKESILPKGDSDKLIPRKTKKFYWDTKKYGGFDSPIVAYSILVIADIEKGKSKKLKTVKALVGVTIMEKMTFERDPVAFLERKGYRNVQEENIIKLPKYSLFKLENGRKRLLASARELQKGNEIVLPNHLGTLLYHAKNIHKVDEPKHLDYVDKHKDEFKELLDVVSNFSKKYTLAEGNLEKIKELYAQNNGEDLKELASSFINLLTFTAIGAPATFKFFDKNIDRKRYTSTTEILNATLIHQSITGLYETRIDLSKLGGD

SEQ ID NO: 138 - protein, 1345 aa, Streptococcus mutans
MKKPYSIGLDIGTNSVGWAVVTDDYKVPAKKMKVLGNTDKSHIKKNLLGALLFDSGNTAADRRLKRTARRRYTRRRNRILYLQEIFAEEMSKVDDSFFHRLEDSFLVTEDKRGERHPIFGNLEEEVKYHENFPTIYHLRQYLADNPEKVDLRLVYLALAHIIKFRGHFLIEGKFDTRNNDVQRLFQEFLAVYDNTFENSSLQEQNVQVEEILTDKISKSAKKDRVLKLFPNEKSNGRFAEFLKLIVGNQADFKKHFELEEKAPLQFSKDTYEEELEVLLAQIGDNYAELFLSAKKLYDSILLSGILTVTDVSTKAPLSASMIQRYNEHQMDLAQLKQFIRQKLSDKYNEVFSDVSKDGYAGYIDGKTNQEAFYKYLKGLLNKIEGSGYFLDKIEREDFLRKQRTFDNGSIPHQIHLQEMRAIIRRQAEFYPFLADNQDRIEKILTFRIPYYVGPLARGKSDFAWLSRKSADKITPWNFDEIVDKESSAEAFINRMTNYDLYLPNQKVLPKHSLLYEKFTVYNELTKVKYKTEQGKTAFFDANMKQEIFDGVFKVYRKVTKDKLMDFLEKEFDEFRIVDLTGLDKENKVFNASYGTYHDLCKILDKDFLDNSKNEKILEDIVLTLTLFEDREMIRKRLENYSDLLTKEQVKKLERRHYTGWGRLSAELIHGIRNKESRKTILDYLIDDGNSNRNFMQLINDDALSFKEEIAKAQVIGETDNLNQVVSDIAGSPAIKKGILQSLKIVDELVKIMGHQPENIVVEMARENQFTKQGRRNSQQRLKGLTDSIKEFGSQILKEHPVENSQLQNDRLFLYYLQNGRDMYTGEELDIDYLSQYDIDHIIPQAFIKDNSIDNRVLTSSKENRGKSDDVPSKDVVRKMKSYWSKLLSAKLITQRKFDNLTKAERGGLTDDDKAGFIKRQLVETRQITKHVARILDERFYTETDENNKKIRQVKIVTLKSNLVSNFRKEFELYKVREINDYHHAHDAYLNAVIGKALLGVYPQLEPEFVYGDYPHFHGHKENKATAKKFFYSNIMNFFKKDDVRTDKNGEIIWKKDEHISNIKKVLSYPQVNIVKKVEEQTGGFSKESILPKGNSDKLIPRKTKKFYWDTKKYGGFDSPIVAYSILVIADIEKGKSKKLKTVKALVGVTIMEKMTFERDPVAFLERKGYRNVQEENIIKLPKYSLFKLENGRKRLLASARELQKGNEIVLPNHLGTLLYHAKNIHKVDEPKHLDYVDKHKDEFKELLDVVSNFSKKYTLAEGNLEKIKELYAQNNGEDLKELASSFINLLTFTAIGAPATFKFFDKNIDRKRYTSTTEILNATLIHQSITGLYETRIDLSKLGGD

SEQ ID NO: 139 - protein, 1345 aa, Streptococcus mutans
MKKPYSIGLDIGTNSVGWAVVTDDYKVPAKKMKVLGNTDKSHIKKNLLGALLFDSGNTAADRRLKRTARRRYTRRRNRILYLQEIFAEEMSKVDDSFFHRLEDSFLVTEDKRGERHPIFGNLEEEVKYHENFPTIYHLRQYLADNPEKVDLRLVYLALAHIIKFRGHFLIEGKFDTRNNDVQRLFQEFLAVYDNTFENSSLQEQNVQVEEILTDKISKSAKKDRVLKLFPNEKSNGRFAEFLKLIVGNQADFKKHFELEEKAPLQFSKDTYEEELEVLLAQIGDNYAELFLSAKKLYDSILLSGILTVTDVSTKAPLSASMIQRYNEHQMDLAQLKQFIRQKLSDKYNEVFSDVSKDGYAGYIDGKTNQEAFYKYLKGLLNKIEGSGYFLDKIEREDFLRKQRTFDNGSIPHQIHLQEMRAIIRRQAEFYPFLADNQDRIEKILTFRIPYYVGPLARGKSDFAWLSRKSADKITPWNFDEIVDKESSAEAFINRMTNYDLYLPNQKVLPKHSLLYEKFTVYNELTKVKYKTEQGKTAFFDANMKQEIFDGVFKVYRKVTKDKLMDFLEKEFDEFRIVDLTGLDKENKAFNASYGTYHDLRKILDKDFLDNSKNEKILEDIVLTLTLFEDREMIRKRLENYSDLLTKEQVKKLERRHYTGWGRLSAELIHGIRNKESRKTILDYLIDDGNSNRNFMQLINDDALSFKEEIAKAQVIGETDNLNQVVSDIAGSPAIKKGILQSLKIVDELVKIMGHQPENIVVEMARENQFTNQGRRNSQQRLKGLTDSIKEFGSQILKEHPVENSQLQNDRLFLYYLQNGRDMYTGEELDIDYLSQYDIDHIIPQAFIKDNSIDNRVLTSSKENRGKSDDVPSKNVVRKMKSYWSKLLSAKLITQRKFDNLTKAERGGLTDDDKAGFIKRQLVETRQITKHVARILDERFHTETDENNKKIRQVKIVTLKSNLVSNFRKEFELYKVREINDYHHAHDAYLNAVIGKALLGVYPQLEPEFVYGDYPHFHGHKENKATAKKFFYSNIMNFFKKDDVRTDKNGEIIWKKDEHISNIKKVLSYPQVNIVKKVEEQTGGFSKESILPKGNSDKLIPRKTKKFYWDTKKYGGFDSPIVAYSILVIADIEKGKSKKLKTVKALVGVTIMEKMTFERDPVAFLERKGYRNVQEENIIKLPKYSLFKLENGRKRLLASARELQKGNEIVLPNHLGTLLYHAKNIHKVDEPKHLDYVDKHKDEFKELLDVVSNFSKKYTLAEGNLEKIKELYAQNNGEDLKELSSSFINLLTFTAIGAPAAFKFFDKNIDRKRYTSTTEILNATLIHQSITGLYETRIDLSKLGGD

SEQ ID NO: 140 - protein, 1355 aa, Streptococcus mutans
MKKPYSIGLDIGTNSVGWAVVTDDYKVPAKKMKVLGNTDKSHIKKNLLGALLFDSGNTAEDRRLKRTARRRYTRRRNRILYLQEIFAEEMSKVDDSFFHRLDESFLTDDDKNFDSHPIFGNKAEEDAYHQKFPTIYHLRKHLADSTEKADLRLVYLALAHMIKFRGHFLIEGELNAENTDVQKLFADFVGVYDRTFDDSHLSEITVDASSILTEKISKSRRLEKLINNYPKEKKNTLFGNLIALSLGLQPNFKTNFKLSEDAKLQFSKDTYEEDLEELLGKIGDDYADLFTLAKNLYDAILLSGILTADDSSTKAPLSASMIKRYAEHHEDLEKLKEFIKANKPELYHDIFKDETKNGYAGYIENGVKQDEFYKYLKNTLSKITGSDYFLDQIEREDFLRKQRTFDNGSIPHQIHLQEMHAILRRQGDYYPFLKENQDRIEKILTFRIPYYVGPLARKNSRFAWAEYHSDEAVTPWNFDQVIDKESSAQAFIEHMTNNDLYLPNEKVLPKHSPLYEKYTVYNELTKIKYVTEIGEAKFFDANLKQEIFDGLFKHERKVTKKKLRTFLDKNFDEFRIVDIQGLDKETETFNASYATYQDLLKVIKDKVFMDNPENAEILENIVLTLTLFEDREMIKQRLAKYADVFDKKVIDQLARRHYTGWGRLSAKLLNGIRDKQSCKTIMDYLIDDAQSNRNLMQLITDDNLTFKDDIVKAQYVDNSDDLHQVVQSLAGSPAIKKGILQSLKIVDELVKVMGKEPEQIVVEMARENQTTAKGRRNSQQRYKRLKEAIKSLDRDLNHKILKEHPTDNQALQNNRLFLYYLQNGRDMYTGESLDINRLSDYDIDHVIPQAFIKDNSIDNRVLTSSKANRGKSDDVPSEDVVNRMRPFWNKLLSSGLISQRKYNNLTKKELTLDDKAGFIKRQLVETRQITKHVARMLDERFNKEFDDNNKRIRRVKIVTLKSNLVSSFRKEFELYKVREINDYHHAHDAYLNAVVVKALLVKYPKLEPEFVYGEYPKYNSYRERKTATQKMFFYSNIMNMFKSKVKLADDQIVERPMIEVNDETGEIAWDKTKHITTVKKVLSYPQVNIVKKVEEQTIGQNGGLFDDNPKSPLEVIPSKLVPLKKALNPEKYGGYQKPTTAYPILLIVDTKQLIPISVMDKKRFEQNPVKFLKDKGYQQIEKNNFVKLPKYTLVDIGNGIKRLWASSKEVHKGNQLVVSKKSQDLLYHAHHLDNDYSNEYVKNHYQQFDILFNEITSFSKKCKLGKEHIQKIEEAYSKERDFASIEELADGFIKLLGFTQLGATSPFSFLGIKLNQKQYTGKKDYLLPCMEATLIHQSITGLYETRIDLSKLGGD

SEQ ID NO: 141 - protein, 1345 aa, Streptococcus mutans
MKKPYSIGLDIGTNSVGWSVVTDDYKVPAKKMKVLGNTDKSHIEKNLLGALLFDSGNTAEDRRLKRTARRRYTRRRNRILYLQEIFSEEMGKVDDSFFHRLEDSFLVTEDKRGERHPIFGNLEEEVKYHENFPTIYHLRQYLADNPEKVDLRLVYLALAHIIKFRGHFLIEGKFDTRNNDVQRLFQEFLAVYDNTFENSSLQEQNVQVEEILTDKISKSAKKDRVLKLFPNEKSNGRFAEFLKLIVGNQADFKKHFELEEKAPLQFSKDTYEEELEVLLAQIGDNYAELFLSAKKLYDSILLSGILTVTDVGTKAPLSASMIQRYNEHQMDLAQLKQFIRQKLSDKYNEVFSDVSKDGYAGYIDGKTNQEAFYKYLKGLLNKIEGSGYFLDKIEREDFLRKQRTFDNGSIPHQIHLQEMRAIIRRQAEFYPFLADNQDRIEKLLTFRIPYYVGPLARGKSDFAWLSRKSADKITPWNFDEIVDKESSAEAFINRMTNYDLYLPNQKVLPKHSLLYEKFTVYNELTKVKYKTEQGKTAFFDANMKQEIFDGVFKVYRKVTKDKLMDFLEKEFDEFRIVDLTGLDKENKVFNASYGTYHDLCKILDKDFLDNSKNEKILEDIVLTLTLFEDREMIRKRLENYSDLLTKEQVKKLERRHYTGWGRLSAELIHGIRNKESRKTILDYLIDDGNSNRNFMQLINDDALSFKEEIAKAQVIGETDNLNQVVSDIAGSPAIKKGILQSLKIVDELVKIMGHQPENIVVEMARENQFTNQGRRNSQQRLKGLTDSIKEFGSQILKEHPVENSQLQNDRLFLYYLQNGRDMYTGEELDIDYLSQYDIDHIIPQAFIKDNSIDNRVLTSSKENRGKSDDVPSKDVVRKMKSYWSKLLSAKLITQRKFDNLTKAERGGLTDDDKAGFIKRQLVETRQITKHVARILDERFNTETDENNKKIRQVKIVTLKSNLVSNFRKEFELYKVREINDYHHAHDAYLNAVIGKALLGVYPQLEPEFVYGDYPHFHGHKENKATAKKFFYSNIMNFFKKDDVRIDKNGEIIWKKDEHISNIKKVLSYPQVNIVKKVEEQTGGFSKESILPKGNSDKLIPRKTKKFYWDTKKYGGFDSPIVAYSILVIADIEKGKSKKLKTVKALVGVTIMEKMTFERDPVAFLERKGYRNVQEENIIKLPKYSLFKLENGRKRLLASARELQKGNEIVLPNHLGTLLYHAKNIHKVDEPKHLDYVDKHKDEFKELLDVVSNFSKKYTLAEGNLEKIKELYAQNNGEDLKELASSFINLLTFTAIGAPATFKFFDKNIDRKRYTSTTEILNATLIHQSITGLYETRIDLSKLGGD

SEQ ID NO: 142 - protein, 1345 aa, Streptococcus mutans
MKKPYSIGLDIGTNSVGWAVVTDDYKVPAKKMKVLGNTDKSHIKKNLLGALLFDSGNTAEDRRLKRTARRRYTRRRNRILYLQEIFSEEMGKVDDSFFHRLEDSFLVTEDKRGERHPIFGNLEEEVKYHENFPTIYHLRQYLADNPEKTDLRLVYLALAHIIKFRGHFLIEGKFDTRNNDVQRLFQEFLAVYDNTFENSSLQEQNVQVEEILTDKISKSAKKDRVLKLFPNEKSNGRFAEFLKLIVGNQADFKKHFELEEKAPLQFSKDIYEEELEVLLAQIGDNYAELFLSAKKLYDSILLSGILTVTDVSTKAPLSASMIQRYNEHQMDLAQLKQFIRQKLSDKYNEVFSDVSKDGYAGYIDGKTNQEAFYKYLKGLLNKIEGSGYFLDKIEREDFLRKQRTFDNGSIPHQIHLQEMRAIIRRQAEFYPFLADNQDRIEKILTFRIPYYVGPLARGKSDFAWLSRKSADKITPWNFDEIVDKESSVEAFINRMTNYDLYLPNQKVLPKHSLLYEKFTVYNELTKVKYKTEQGKTAFFDANMKQEIFDGVFKVYRKVTKDKLMDFLEKEFDEFRIVDLTGLDKENKAFNASYGTYHDLRKILDKDFLDNSKNEKILEDIVLTLTLFEDREMIRKRLKNYSDLLTKEQLKKLERRHYTGWGRLSAELIHGIRNKESRKTILDYLIDDGNSNRNFMQLINDDALSFKEEIAKAQVIGETDNLNQVVSDIAGSPAIKKGILQSLKIVDELVKIMGHQPENIVVEMARENQFTNQGRRNSQQRLKGLTDSIKEFGSQILKEHPVENSQLQNDRLFLYYLQNGRDMYTGEELDIDYLSQYDIDHIIPQAFIKDNSIDNRVLTSSKENRGKSDDVPSKNVVRKMKSYWSKLLSAKLITQRKFDNLTKAERGGLTDDDKAGFIKRQLVETRQITKHVARILDERFHTETDENNKKIRQVKIVTLKSNLVSNFRKEFELYKVREINDYHHAHDAYLNAVIGKALLGVYPQLEPEFVYGDYPHFHGHKENKATAKKFFYSNIMNFFKKDDVRTDKNGEIIWKKDEHISNIKKVLSYPQVNIVKKVEEQTGGFSKESILPKGNSDKLIPRKTKKFYWDTKKYGGFDSPIVAYSILVIADIEKGKSKKLKTVKALVGVTIMEKMTFERDPVAFLERKGYRNVQEENIIKLPKYSLFKLENGRKRLLASARELQKGNEIVLPNHLGTLLYHAKNIHKVDEPKHLDYVDKHKDEFKELLDVVSNFSKKYTLAEGNLEKIKELYAQNNGEDLKELASSFINLLTFTAIGAPATFKFFDKNIDRKRYTSTTEILNATLIHQSITGLYETRIDLSKLGGD

SEQ ID NO: 143 - protein, 1345 aa, Streptococcus mutans
MKKPYSIGLDIGTNSVGWAVVTDDYKVSAKKMKVLGNTDKSHIKKNLLGALLFDSGNTAEDRRLKRTARRRYTRRRNRILYLQEIFAEEMSKVDDSFFHRLEDSFLVTEDKRGERHPIFGNLEEEVKYHENFPTIYHLRQYLADNPEKVDLRLVYLALAHIIKFRGHFLIEGKFDTRNNDVQRLFQEFLAVYDNTFENSSLQEQNVQVEEILTDKISKSAKKDRVLKLFPNEKSNGRFAEFLKLIVGNQADFKKHFELEEKAPLQFSKDTYEEELEVLLAQIGDNYAELFLSAKKLYDSILLSGILTVTDVSTKAPLSASMIQRYNEHQMDLAQLKQFIRQKLSDKYNEVFSDVSKDGYAGYIDGKTNQEAFYKYLKGLLNKIEGSGYFLDKIEREDFLRKQRTFDNGSIPHQIHLQEMRAIIRRQAEFYPFLADNQDRIEKILTFRIPYYVGPLARGKSDFAWLSRKSADKITPWNFDEIVDKESSAEAFINRMTNYDLYLPNQKVLPKHSLLYEKFTVYNELTKVKYKTEQGKTAFFDANMKQEIFDGVFKVYRKVTKDKLMDFLEKEFDEFRIVDLTGLDKENKAFNASYGTYHDLRKILDKDFLDNSKNEKILEDIVLTLTLFEDREMIRKRLENYSDLLTKEQVKKLERRHYTGWGRLSAELIHGIRNKESRKTILDYLIDDGNSNRNFMQLINDDALSFKEEIAKAQVIGETDNLNQVVSDIAGSPAIKKGILQSLKIVDELVKIMGHQPENIVVEMARENQFTNQGRRNSQQRLKGLTDSIKEFGSQILKEHPVEHSQLQNDRLFLYYLQNGRDMYTGEELDIDYLSQYDIDHIIPQAFIKDNSIDNRVLTSSKENRGKSDDVPSKNVVRKMKSYWSKLLSAKLITQRKFDNLTKAERGGLTDDDKAGFIKRQLVETRQITKHVARILDERFHTETDENNKKIRQVKIVTLKSNLVSNFRKEFELYKVREINDYHHTHDAYLNAVIGKALLGVYPQLEPEFVYGDYPHFHGHKENKATAKKFFYSNIMNFFKKDDVRTDKNGEIIWKKDEHISNIKKVLSYPQVNIVKKVEEQTGGFSKESILPKGNSDKLIPRKTKKFYWDTKKYGGFDSPIVAYSILVIADIEKGKSKKLKTVKALVGVTIMEKMTFERDPVAFLERKGYRNVQEENIIKLPKYSLFKLENGRKRLLASARELQKGNEIVLPNHLGTLLYHAKNIHKVDEPKHLDYVDKHKDEFKELLDVVSNFSKKYTLAEGNLEKIKELYAQNNGEDLKELASSFINLLTFTAIGAPATFKFFDKNIDRKRYTSTTEILNATLIHQSITGLYETRIDLSKLGGD

SEQ ID NO: 144 - protein, 1345 aa, Streptococcus mutans
MKKPYSIGLDIGTNSVGWAVVTDDYKVPAKKMKVLGNTDKSHIKKNLLGALLFDSGNTAEDRRLKRTARRRYTRRRNRILYLQEIFSEEMGKVDDSFFHRLEDSFLVTEDKRGERHPIFGNLEEEVKYHENFPTIYHLRQYLADNPEKTDLRLVYLALAHIIKFRGHFLIEGKFDTRNNDVQRLFQEFLAVYDNTFENSSLQEQNVQVEEILTDKISKSAKKDRVLKLFPNEKSNGRFAEFLKLIVGNQADFKKHFELEEKAPLQFSKDIYEEELEVLLAQIGDNYAELFLSAKKLYDSILLSGILTVTDVSTKAPLSASMIQRYNEHQMDLAQLKQFIRQKLSDKYNEVFSDVSKDGYAGYIDGKTNQEAFYKYLKGLLNKIEGSGYFLDKIEREDFLRKQRTFDNGSIPHQIHLQEMRAIIRRQAEFYPFLADNQDRIEKILTFRIPYYVGPLARGKSDFAWLSRKSADKITPWNFDEIVDKESSVEAFINRMTNYDLYLPNQKVLPKHSLLYEKFTVYNELTKVKYKTEQGKTAFFDANMKQEIFDGVFKVYRKVTKDKLMDFLEKEFDEFRIVDLTGLDKENKAFNASYGTYHDLRKILDKDFLDNSKNEKILEDIVLTLTLFEDREMIRKRLKNYSDLLTKEQLKKLERRHYTGWGRLSAELIHGIRNKESRKTILDYLIDDGNSNRNFMQLINDDALSFKEEIAKAQVIGETDNLNQVVSDIAGSPAIKKGILQSLKIVDELVKIMGHQPENIVVEMARENQFTNQGRRNSQQRLKGLTDSIKEFGSQILKEHPVENSQLQNDRLFLYYLQNGRDMYTGEELDIDYLSQYDIDHIIPQAFIKDNSIDNRVLTSSKENRGKSDDVPSKDVVRKMKSYWSKLLSAKLITQRKFDNLTKAERGGLTDDDKAGFIKRQLVETRQITKHVARILDERFNTETDENNKKIRQVKIVTLKSNLVSNFRKEFELYKVREINDYHHAHDAYLNAVIGKALLGVYPQLEPEFVYGDYPHFHGHKENKATAKKFFYSNIMNFFKKDDVRTDKNGEIIWKKDEHISNIKKVLSYPQVNIVKKVEEQTGGFSKESILPKGNSYKLIPRKTKKFYWDTKKYGGFDSPIVAYSILVIADIEKGKSKKLKTVKALVGVTIMEKMTFERDPVAFLERKGYRNVQEENIIKLPKYSLFKLENGRKRLLASARELQKGNEIVLPNHLGTLLYHAKNIHKVDEPKHLDYVDKHKDEFKELLDVVSNFSKKYTLAEGNLEKIKELYAQNNGEDLKELASSFINLLTFTAIGAPAAFKFFDKNIDRKRYTSTTEILNATLIHQSITGLYETRIDLSKLGGD

SEQ ID NO: 145 - protein, 1345 aa, Streptococcus mutans
MKKPYSIGLDIGTNSVGWAVVTDDYKVPAKKMKVLGNTDKSHIKKNLLGALLFDSGNTAEDRRLKRTTRRRYTRRRNRILYLQEIFSEEMGKVDDSFFHRLEDSFLVTEDKRGERHPIFGNLEEEVKYHENFPTIYHLRQYLADNPEKTDLRLVYLALAHIIKFRGHFLIEGKFDTRNNDVQRLFQEFLAVYDNTFENSSLQEQNVQVEEILTDKISKSAKKDRVLKLFPNEKSNGCFAEFLKLIVGNQADFKKHFELEEKAPLQFSKDTYEEELEVLLAQIGDNYAELFLSAKKLYDSILLSGILTVTDVSTKAPLSASMIQRYNEHQMDLTQLKQFIRQKLSDKYNEVFSDVSKDGYAGYIDGKTNQEAFYKYLKGLLNKIEGSGYFLDKIEREDFLRKQRTFDNGSIPHQIHLQEMRAIIRRQAEFYPFLADNQDRIEKLLTFRIPYYVGPLASGKSDFAWLSRKSADKITPWNFDEIVDKESSAEAFINRMTNYDLYLPNQKVLPKHSLLYEKFTVYNELTKVKYKTEQGKTAFFDANMKQEIFDGVFKVYRKVTKDKLMDFLEKEFDEFRIVDLTGLDKENKVFNASYGTYHDLCKILDKDFLDNSKNEKILEDIVLTLTLFEDREMIRKRLENYSDLLTKEQVKKLERRHYTGWGRLSAELIHGIRNKESRKTILDYLIDDGNSNRNFMQLINDDALSFKEEIAKAQVIGETDNLNQVVSDIAGSPAIKKGILQSLKIVDELVKIMGHQPENIVVEMARENQFTNQGRRNSQQRLKGLTDSIKEFGSQILKEHPVENSQLQNDRLFLYYLQNGRDMYTGEELDIDYLSQYDIDHIIPQAFIKDNSIDNRVLTSSKENRGKSDDVPSKDVVRKMKSYWSKLLSAKLITQRKFDNLTKAERGGLTDDDKAGFIKRQLVETRQITKHVARILDERFNTETDENNKKIRQVKIVTLKSNLVSNFRKEFELYKVREINDYHHAHDAYLNAVIGKALLGVYPQLEPEFVYGDYPHFHGHKENKATAKKFFYSNIMNFFKKDDVRTDKNGEIIWKKDEHISNIKKVLSYPQVNIVKKVEEQTGGFSKESILPKGNSDKLIPRKTKKFYWDTKKYGGFDSPIVAYSILVIADIEKGKSKKLKTVKALVGVTIMEKMTFERDPVAFLERKGYRNVQEENIIKLPKYSLFKLENGRKRLLASARELQKGNEIVLPNHLGTLLYHAKNIHKVDEPKHLDYVDKHKDEFKELLDVVSNFSKKYTLAEGNLEKIKELYAQNNGEDLKELASSFINLLTFTAIGAPATFKFFDKNIDRKRYTSTTEILNATLIHQSITGLYETRIDLSKLGGD

SEQ ID NO: 146 - protein, 1345 aa, Streptococcus mutans
MKKPYSIGLDIGTNSVGWAVVTDDYKVPAKKMKVLGNTDKSHIKKNLLGALLFDSGNTAEDRRLKRTARRRYTRRRNRILYLQEIFSEEMGKVDDSFFHRLEDSFLVTEDKRGERHPIFGNLEEEVKYHENFPTIYHLRQYLADNPEKTDLRLVYLALAHIIKFRGHFLIEGKFDTRNNDVQRLFQEFLAVYDNTFENSSLQEQNVQVEEILTDKISKSAKKDRVLKLFPNEKSNGRFAEFLKLIVGNQADFKKHFELEEKAPLQFSKDIYEEELEVLLAQIGDNYAELFLSAKKLYDSILLSGILTVTDVSTKAPLSASMIQRYNEHQMDLAQLKQFIRQKLSDKYNEVFSDVSKDGYAGYIDGKTNQEAFYKYLKGLLNKIEGSGYFLDKIEREDFLRKQRTFDNGSIPHQIHLQEMRAIIRRQAEFYPFLADNQDRIEKILTFRIPYYVGPLARGKSDFAWLSRKSADKITPWNFDEIVDKESSAEAFINRMTNYDLYLPNQKVLPKHSLLYEKFTVYNELTKVKYKTEQGKTAFFDANMKQEIFDGVFKVYRKVTKDKLMDFLEKEFDEFRIVDLTGLDKENKAFNASYGTYHDLRKILDKDFLDNSKNEKILEDIVLTLTLFEDREMIRKRLKNYSDLLTKEQLKKLERRHYTGWGRLSAELIHGIRNKESRKTILDYLIDDGNSNRNFMQLINDDALSFKEEIAKAQVIGETDNLNQVVSDIAGSLAIKKGILQSLKIVDELVKIMGHQPENIVVEMARENQFTNQGRRNSQQRLKGLTDSIKEFGSQILKEHPVENSQLQNDRLFLYYLQNGRDMYTGEELDIDYLSQYDIDHIIPQAFIKDNSIDNRVLTSSKENRGKSDDVPSKDVVRKMKSYWSKLLSAKLITQRKFDNLTKGERGGLTDDDKAGFIKRQLVETRQITKHVARILDERFNTETDENNKKIRQVKIVTLKSNLVSNFRKEFELYKVREINDYHHAHDAYLNAVIGKALLGVYPQLEPEFVYGDYPHFHGHKENKATAKKFFYSNIMNFFKKDDVRTDKNGEIIWKKDEYISNIKKVLSYPQVNIVKKVEEQTGGFFKESILPKGDSDKLIPRKTKKFYWDTKKYGGFDSPIVAYSILVIADIEKGKSKKLKTVKALVGVTIMEKMTFERDPVAFLERKGYRNVQEENIIKLPKYSLFKLENGRKRLLASARELQKGNEIVLPNHLGTLLYHAKNIHKVDEPKHLDYVDKHKDEFKELLDVVSNFSKKYTLAEGNLEKIKELYAQNNGEDLKELASSFINLLTFTAIGAPATFKFFDKNIDRKRYTSTTEILNATLIHQSITGLYETRIDLSKLGGD

SEQ ID NO: 147 - protein, 1345 aa, Streptococcus mutans
MKKPYSIGLDIGTNSVGWAVVTDDYKVPAKKMKVLGNTDKSHIKKNLLGALLFDSGNTAEDRRLKRTARRRYTRRRNRILYLQEIFSEEMGKVNDSFFHRLEDSFLVTEDKRGERHPIFGNLEEEVKYHENFPTIYHLRQYLADNPEKVDLRLVYLALAHIIKFRGHFLIEGKFDTRNNDVQRLFQEFLAVYDNTFENSSLQEQNVQVEEILTDKISKSAKKDRVLKLFPNEKSNGRFAEFLKLIVGNQADFKKHFELEEKAPLQFSKDTYEEELEVLLAQIGDNYAELFLSAKKLYDSILLSGILTVTDVSTKAPLSASMIQRYNEHQMDLAQLKQFIRQKLSDKYNEVFSDVSKDGYAGYIDGKTNQEAFYKYLKGLLNKIEGSGYFLDKIEREDFLRKQRTFDNGSIPHQIHLQEMRAIIRRQAEFYPFLADNQDRIEKILTFRIPYYVGPLARGKSDFAWLSRKSADKITPWNFDEIVDKESSAEAFINRMTNYDLYLPNQKVLPKHSLLYEKFTVYNELTKVKYKTEQGKTAFFDANMKQEIFDGVFKVYRKVTKDKLMDFLEKEFDEFRIVDLTGLDKENKVFNASYGTYHDLCKILDKDFLDNSKNEKILEDIVLTLTLFEDREMIRKRLENYSDLLTKEQVKKLERRHYTGWGRLSAELIHGIRNKESRKTILDYLIDDGNSNRNFMQLINDDALSFKEEIAKAQVIGETDNLNQVVSDIAGSPAIKKGILQSLKIVDELVKIMGHQPENIVVEMARENQFTKQGRRNSQQRLKGLTDSIKEFGSQILKEHPVENSQLQNDRLFLYYLQNGRDMYTGEELDIDYLSQYDIDHIIPQAFIKDNSIDNRVLTSSKENRGKSDDVPSKDVVRKMKSYWSKLLSAKLITQRKFDNLTKAERGGLTDDDKAGFIKRQLVETRQITKHVARILDERFYTETDENNKKIRQVKIVTLKSNLVSNFRKEFELYKVREINDYHHAHDAYLNAVIGKALLGVYPQLEPEFVYGDYPHFHGHKENKATAKKFFYSNIMNFFKKDDVRTDKNGEIIWKKDEYISNIKKVLSYPQVNIVKKVEEQTGGFSKESILPKGNSDKLIPRKTKKFYWDTKKYGGFDSPIVAYSILVIADIEKGKSKKLKTVKALVGVTIMEKMTFERDPIAFLERKGYRNVQEENIIKLPKYSLFKLENGRKRLLASARELQKGNEIVLPNHLGTLLYHAKNIHKVDEPKHLDYVDKHKDEFKELLDVVSNFSKKYTLAEGNLEKIKELYAQNNGEDLKELASSFINLLTFTAIGAPAAFKFFDKNIDRKRYTSTTEILNATLIHQSITGLYETRIDLSKLGGD

SEQ ID NO: 148 - protein, 1345 aa, Streptococcus mutans
MKKPYSIGLDIGTNSVGWAVVTDDYKVPAKKMKVLGNTDKSHIKKNLLGALLFDSGNTAEDRRLKRTARRRYTRRRNRILYLQEIFSEEMGKVDDSFFHRLEDSFLVTEDKRGERHPIFGNLEEEVKYHENFPTIYHLRQYLADNPEKTDLRLVYLALAHIIKFGGHFLIEGKFDTRNNDVQRLFQEFLAVYDNTFENSSLQEQNVQVEEILTDKISKSAKKDRVLKLFPNEKSNGRFAEFLKLIVGNQADFKKHFELEEKAPLQFSKDIYEEELEVLLAQIGDNYAELFLSAKKLYDSILLSGILTVTDVSTKAPLSASMIQRYNEHQMDLAQLKQFIRQKLSDKYNEVFSDVSKDGYAGYIDGKTNQEAFYKYLKGLLNKIEGSGYFLDKIEREDFLRKQRTFDNGSIPHQIHLQEMRAIIRRQAEFYPFLADNQDRIEKILTFRIPYYVGPLARGKSDFAWLSRKSADKITPWNFDEIVDKESSVEAFINRMTNYDLYLPNQKVLPKHSLLYEKFTVYNELTKVKYKTEQGKTAFFDANMKQEIFDGVFKVYRKVTKDKLMDFLEKEFDEFRIVDLTGLDKENKAFNASYGTYHDLRKILDKDFLDNSKNEKILEDIVLTLTLFEDREMIRKRLKNYSDLLTKEQLKKLERRHYTGWGRLSAELIHGIRNKESRKTILDYLIDDGNSNRNFMQLINDDALSFKEEIAKAQVIGETDNLNQVVSDIAGSPAIKKGILQSLKIVDELVKIMGHQPENIVVEMARENQFTNQGRRNSQQRLKGLTDSIKEFGSQILKEHPVENSQLQNDRLFLYYLQNGRDMYTGEELDIDYLSQYDIDHIIPQAFIKDNSIDNRVLTSSKENRGKSDDVPSKNVVRKMKSYWSKLLSAKLITQRKFDNLTKAERGGLTDDDKAGFIKRQLVETRQITKHVARILDERFHTETDENNKKIRQVKIVTLKSNLVSNFRKEFELYKVREINDYHHAHDAYLNAVIGKALLGVYPQLEPEFVYGDYPHFHGHKENKATAKKFFYSNIMNFFKKDDVRTDKNGEIIWKKDEHISNIKKVLSYPQVNIVKKVEEQTGGFSKESILPKGNSDKLIPRKTKKFYWDTKKYGGFDSPIVAYSILVIADIEKGKSKKLKTVKALVGVTIMEKMTFERDPVAFLERKGYRNVQEENIIKLPKYSLFKLENGRKRLLASARELQKGNEIVLPNHLGTLLYHAKNIHKVDEPKHLDYVDKHKDEFKELLDVVSNFSKKYTLAEGNLEKIKELYAQNNGEDLKELASSFINLLTFTAIGAPATFKFFDKNIDRKRYTSTTEILNATLIHQSITGLYETRIDLSKLGGD

SEQ ID NO: 149 - protein, 1359 aa, Streptococcus mutans
MKKPYSIGLDIGTNSVGWAVVTDDYKVPAKKMKVLGNTDKSHIKKNLLGALLFDSGNTAEDRRLKRTARRRYTRRRNRILYLQEIFAEEMMQVDESFFQRLDDSFLVEEDKRGSRYPIFGTLKEEKKYHKEFKTIYHLREKLANSTEKADLRLVYLSLAHMIKFRGHFLIEGQLKAENTNVQALFKDFVEVYDKTVEESHLSEMTVDALSILTEKVSKSRRLENLVECYPTEKKNTLFGNLIALSLGLQPNFKTNFQLSEDAKLQFSKDTYEEDLEGLLGEIGDEYADLFASAKNLYDAILLSGILAVDDNTTKAPLSASMVKRYKEHKEELAAFKRFIKEKLPKKYEEIFKDDTKNGYAGYVGADKKLRKRSGKLATEEEFYKYVKGILNKVEGADVWLDKIDREDFLRKQRTFDNGSIPHQIHLQEMHAILRRQGEHYPFLKENQDKIEKILTFRIPYYVGPLVRKGSRFAWAEYKADEKITPWNFDDILDKEKSAEKFITRMTLNDLYLPEEKVLPKHSLLYETFTVYNELTKVKYVNEQGEAKFFDANMKQEIFDHVFKENRKVTKDKLLNYLNKEFEEFRIVNLTGLDKENKVFNSSLGTYHDLRKILNKSFLDNKENEQIIEDIIQTLTLFEDREMIRQRLQKYSDIFTKAQLKKLERRHYTGWGRLSYKLINGIRDKQSNKTILGYLIDDGYSNRNFMQLINDDALSFKEEIAKAQVIGEMDGLNQVVSDIAGSPAIKKGILQSLKIVDELVKVMGHNPANIVIEMARENQTTAKGRRSSQKRYKRLEEAIKNLDHDLNHKILKEHPTDNQALQNDRLFLYYLQNGRDMYTEDPLDINRLSDYDIDHIIPQAFIKDNSIDNRVLTRSDKNRGKSDDVPSEEVVHKMKPFWSKLLSAKLITQRKFDNLTKAERGGLTDDDKAGFIKRQLVETRQITKHVARILDERFNTETDENNKKIRQVKIVTLKSNLVSNFRKEFELYKVREINDYHHAHDAYLNAVIGKALLGVYPQLEPEFVYGDYPHFHGHKENKATAKKFFYSNIMNFFKKGDVRTDKNGEIIWKKDEHISNIKKVLSYPQVNIVKKVEEQTGGFSKESILPKGNSDKLIPRKTKKFYWDTKKYGGFDSPIVAYSILVIADIEKGKSKKLKTVKALVGVTIMEKMTFERDPVAFLERKGYRNVQEENIIKLPKYSLFKLENGRKRLLASARELQKGNEIVLPNHLETLLYHAKNIHKVDEPKHLDYVDKHKDEFKELLDVVSNFSKKYTLAEGNLEKIKELYAQNNGEDLKELASSFINLLTFTAIGAPAAFKFFDKNIDRKRYTSTTEILNATLIHQSITGLYETRIDLNKLGGD

SEQ ID NO: 150 - protein, 1345 aa, Streptococcus mutans
MKKPYSIGLDIGTNSVGWAVVTDDYKVPAKKMKVLGNTDKSHIKKNLLGALLFDSGNTAEDRRLKRTARRRYTRRRNRILYLQEIFSEEMDKVDDSFFHRLEDSFLVTEDKRGERHPIFGNLEEEVKYHENFPTIYHLRQYLADNPEKVDLRLVYLALAHIIKFRGHFLIEGKFDTRNNDVQRLFQEFLAVYDNTFENSSLQEQNVQVEEILTDKISKSAKKDRVLKLFPNEKSNGRFAEFLKLIVGNQADFKKHFELEEKAPLQFSKDTYEEELEVLLAQIGDNYAELFLSAKKLYDSILLSGILTVTDVSTKAPLSASMIQRYNEHQMDLAQLKQFIRQKLSDKYNEVFSDVSKDGYAGYIDGKTNQEAFYKYLKGLLNKIEGSGYFLDKIEREDFLRKQRTFDNGSIPHQIHLQEMRAIIRRQAEFYPFLADNQDRIEKILTFRIPYYVGPLARGKSDFAWLSRKSADKITPWNFDEIVDKESSAEAFINRMTNYDLYLPNQKVLPKHSLLYEKFTVYNELTKVKYKTEQGKTAFFDANMKQEIFDGVFKVYRKVTKDKLMDFLEKEFDEFRIVDLTGLDKENKVFNASYGTYHDLCKILDKDFLDNSKNEKILEDIVLTLTLFEDREMIRKRLENYSDLLTKEQVKKLERRHYTGWGRLSAELIHGIRNKESRKTILDYLIDDGNSNRNFMQLINDDALSFKEEIAKAQVIGETDNLNQVVSDIAGSPAIKKGILQSLKIVDELVKIMGHQPENIVVEMARENQFTKQGRRNSQQRLKGLTDSIKEFGSQILKEHPVENSQLQNDRLFLYYLQNGRDMYTGEELDIDYLSQYDIDHIIPQAFIKDNSIDNRVLTSSKENRGKSDDVPSKDVVRKMKSYWSKLLSAKLITQRKFDNLTKAERGGLTDDDKAGFIKRQLVETRQITKHVARILDERFYTETDENNKKIRQVKIVTLKSNLVSNFRKEFELYKVREINDYHHAHDAYLNAVIGKALLGVYPQLEPEFVYGDYPHFHGHKENKATAKKFFYSNIMNFFKKDDVRTDKNGEIIWKKDEHISNIKKVLSYPQVNIVKKVEEQTGGFSKESILPKGNSDKLIPRKTKKFYWDTKKYGGFDSPIVAYSILVIADIEKGKSKKLKTVKALVGVTIMEKMTFERDPVAFLERKGYRNVQEENIIKLPKYSLFKLENGRKRLLASARELQKGNEIVLPNHLGTLLYHAKNIHKVDEPKHLDYVDKHKDEFKELLDVVSNFSKKYTLAEGNLEKIKELYAQNNGEDLKELASSFINLLTFTAIGAPATFKFFDKNIDRKRYTSTTEILNATLIHQSITGLYETRIDLSKLGGD

SEQ ID NO: 151 - protein, 1345 aa, Streptococcus mutans
MKKPYSIGLDIGTNSVGWAVVTDDYKVPAKKMKVLGNTDKSHIKKNLLGALLFDSGNTAEDRRLKRTARRRYTRRRNRILYLQEIFSEEMGKVDDSFFHRLEDSFLVTEDKRGERHPIFGNLEEEVKYHENFPTIYHLRQYLADNPEKVDLRLVYLALAHIIKFRGHFLIEGKFDTRNNDVQKLFQEFLAVYDNTFENSSLQEQNVQVEEILTDKISKSAKKDRVLKLFPNEKSNGRFAEFLKLIVGNQADFKKHFELEEKAPLQLSKDTYEEELEVLLAQIGDNYAELFLSAKKLYDSILLSGILTVTDVSTKAPLSASMIQRYNEHQMDLAQLKQFIRQKLSDKYNEVFSDVSKDGYAGYIDGKTNQEAFYKYLKGLLNKIEGSGYFLDKIEREDFLRKQRTFDNGSIPHQIHLQEMRAIIRRQAEFYPFLADNQDRIEKILTFRIPYYVGPLARGKSDFAWLSRKSADKITPWNFDEIVDKESSVEAFINRMTNYDLYLPNQKVLPKHSLLYEKFTVYNELTKVKYKTEQGKTAFFDANMKQEIFDGVFKVYRKVTKDKLMDFLEKEFDEFRIVDLTGLDKENKAFNASYGTYHDLRKILDKDFLDNSKNEKILEDIVLTLTLFEDREMIRKRLENYSDLLTKEQVKKLERRHYTGWGRLSAELIHGIRNKESRKTLLDYLIDDGNSNRNFMQLINDDALSFKEEIAKAQVIGETDNLNQVVSDIAGSPAIKKGILQSLKIVDELVKIMGHQPENIVVEMARENQFTNQGRRNSQQRLKGLTDSIKEFGSQILKEHPVENSQLQNDRLFLYYLQNGRDMYTGEELDIDYLSQYDIDHIIPQAFIKDNSIDNRVLTSSKENRGKSDDVPSKDVVRKMKSYWSKLLSAKLITQRKFDNLTKAERGGLTDDDKAGFIKRQLVETRQITKHVARILDERFNTETDENNKKIRQVKIVTLKSNLVSNFRKEFELYKVREINDYHHAHDAYLNAVIGKALLGVYPQLEPEFVYGDYPHFHGHKENKATAKKFFYSNIMNFFKKDDVRTDKNGEIIWKKDEYISNIKKVLSYPQVNIVKKVEEQTGGFSKESILPKGNSDKLIPRKTKKFYWDTKKYGGFDSPIVAYSILVIADIEKGKSKKLKTVKALVGVTIMEKMTFERDPIAFLERKGYRNVQEENIIKLPKYSLFKLENGRKRLLASARELQKGNEIVLPNHLGTLLYHAKNIHKVDEPKHLDYVDKHKDEFKELLDVVSNFSKKYTLAEGNLEKIKELYAQNNGEDLKELASSFINLLTFTAIGAPATFKFFDKNIDRKRYTSTTEILNATLIHQSITGLYETRIDLSKLGGD

SEQ ID NO: 152 - protein, 1345 aa, Streptococcus mutans
MKKPYSIGLDIGTNSVGWAVVTDDYKVPAKKMKVLGNTDKSHIKKNLLGALLFDSGNTAEDRRLKRTARRRYTRRRNRILYLQEIFSEEMGKVDDSFFHRLEDSFLVTEDKRGERHPIFGNLEEEVKYHENFPTIYHLRQYLADNPEKTDLRLVYLALAHIIKFRGHFLIEGKFDTRNNDVQRLFQEFLAVYDNTFENSSLQEQNVQVEEILTDKISKSAKKDRVLKLFPNEKSNGRFAEFLKLIVGNQADFKKHFELEEKAPLQFSKDIYEEELEVLLAQIGDNYAELFLSAKKLYDSILLSGILTVTDVSTKAPLSASMIQRYNEHQMDLAQLKQFIRQKLSDKYNEVFSDVSKDGYAGYIDGKTNQEAFYKYLKGLLNKIEGSGYFLDKIEREDFLRKQRTFDNGSIPHQIHLQEMRAIIRRQAEFYPFLADNQDRIEKILTFRIPYYVGPLARGKSDFAWLSRKSADKITPWNFDEIVDKESSAEAFINRMTNYDLYLPNQKVLPKHSLLYEKFTVYNELTKVKYKTEQGKTAFFDANMKQEIFDGVFKVYRKVTKDKLMDFLEKEFDEFRIVDLTGLDKENKAFNASYGTYHDLRKILDKDFLDNSKNEKILEDIVLTLTLFEDREMIRKRLKNYSDLLTKEQLKKLERRHYTGWGRLSAELIHGIRNKESRKTILDYLIDDGNSNRNFMQLINDDALSFKEEIAKAQVIGETDNLNQVVSDIAGSLAIKKGILQSLKIVDELVKIMGHQPENIVVEMARENQFTNQGRRNSQQRLKGLTDSIKEFGSQILKEHPVENSQLQNDRLFLYYLQNGRDMYTGEELDIDYLSQYDIDHIIPQAFIKDNSIDNRVLTSSKENRGKSDDVPSKDVVRKMKSYWSKLLSAKLITQRKFDNLTKGERGGLTDDDKAGFIKHQLVETRQITKHVARILDERFNTETDENNKKIRQVKIVTLKSNLVSNFRKEFELYKVREINDYHHAHDAYLNAVIGKALLGVYPQLEPEFVYGDYPHFHGHKENKATAKKFFYSNIMNFFKKDDVRTDKNGEIIWKKDEYISNIKKVLSYPQVNIVKKVEEQTGGFFKESILPKGDSDKLIPRKTKKFYWDTKKYGGFDSPIVAYSILVIADIEKGKSKKLKTVKALVGVTIMEKMTFERDPVAFLERKGYRNVQEENIIKLPKYSLFKLENGRKRLLASARELQKGNEIVLPNHLGTLLYHAKNIHKVDEPKHLDYVDKHKDEFKELLDVVSNFSKKYTLAEGNLEKIKELYAQNNGEDLKELASSFINLLTFTAIGAPATFKFFDKNIDRKRYTSTTEILNATLIHQSITGLYETRIDLSKLGGD

SEQ ID NO: 153 - protein, 1345 aa, Streptococcus mutans
MKKPYSIGLDIGTNSVGWAVVTDDYKVPAKKMKVLGNTDKSHIKKNLLGALLFDSGNTAEDRRLKRTARRRYTRRRNRILYLQEIFSEEMGKVDDSFFHRLEDSFLVTEDKRGERHPIFGNLEEEVKYHENFPTIYHLRQYLADNPEKTDLRLVYLALAHIIKFRGHFLIEGKFDTRNNDVQRLFQEFLAVYDNTFENSSLQEQNVQVEEILTDKISKSAKKDRVLKLFPNEKSNGRFAEFLKLIVGNQADFKKHFELEEKAPLQFSKDIYEEELEVLLAQIGDNYAELFLSAKKLYDSILLSGILTVTDVSTKAPLSASMIQRYNEHQMDLAQLKQFIRQKLSDKYNEVFSDVSKDGYAGYIDGKTNQEAFYKYLKGLLNKIEGSGYFLDKIEREDFLRKQRTFDNGSIPHQIHLQEMRAIIRRQAEFYPFLADNQDRIEKILTFRIPYYVGPLARGKSDFAWLSRKSADKITPWNFDEIVDKESSAEAFINRMTNYDLYLPNQKVLPKHSLLYEKFTVYNELTKVKYKTEQGKTAFFDANMKQEIFDGVFKVYRKVTKDKLMDFLEKEFDEFRIVDLTGLDKENKAFNASYGTYHDLRKILDKDFLDNSKNEKILEDIVLTLTLFEDREMIRKRLENYSDLLTKEQVKKLERRHYTGWGRLSAELIHGIRNKESRKTLLDYLIDDGNSNRNFMQLINDDALSFKEEIAKAQVIGETDNLNQVVSDIAGSPAIKKGILQSLKIVDELVKIMGHQPENIVVEMARENQFTNQGQRNSQQRLKGLTDSIKEFGSQILKEHPVENSQLQNDRLFLYYLQNGRDMYTGEELDIDYLSQYDIDHIIPQAFIKDNSIDNRVLTSSKENRGKSDDVPSKDVVRKMKSYWSKLLSAKLITQRKFDNLTKAERGGLTDDDKAGFIKRQLVETRQITKHVARILDERFNTETDENNKKIRQVKIVTLKSNLVSNFRKEFELYKVREINDYHHAHDAYLNAVIGKALLGVYPQLEPEFVYGDYPHFHGHKENKATAKKFFYSNIMNFFKKDDVRTDKNGEIIWKKDEYISNIKKVLSYPQVNIVKKVEEQTGGFSKESILPKGDSDKLIPRKTKKFYWDTKKYGGFDSPIVAYSILVIADIEKGKSKKLKTVKALVGVTIMEKMTFERDPVAFLERKGYRNVQEENIIKLPKYSLFKLENGRKRLLASARELQKGNEIVLPDHLGTLLYHAKNIHKVDEPKHLDYVDKHKDEFKELLDVVSNFSKKYTLAEGNLEKIKELYAQNNGEDLKELASSFINLLTFTAIGAPATFKFFDKNIDRKRYTSTTEILNATLIHQSITGLYETRIDLSKLGGD

SEQ ID NO: 154 - protein, 1345 aa, Streptococcus mutans
MKKPYSIGLDIGTNSVGWAVVTDDYKVPAKKMKVLGNTDKSHIKKNLLGALLFDSGNTAADRRLKRTARRRYTRRRNRILYLQEIFAEEMSKVDDSFFHRLEDSFLVTEDKRGERHPIFGNLEEEVKYHENFPTIYHLRQYLADNPEKVDLRLVYLALAHIIKFRGHFLIEGKFDTRNNDVQRLFQEFLAVYDNTFENSSLQEQNVQVEEILTDKISKSAKKDRVLKLFPNEKSNGRFAEFLKLIVGNQADFKKHFELEEKAPLQFSKDTYEEELEVLLAQIGDNYAELFLSAKKLYDSILLSGILTVTDVSTKAPLSASMIQRYNEHQMDLAQLKQFIRQKLSDKYNEVFSDVSKDGYAGYIDGKTNQEAFYKYLKGLLNKIEGSGYFLDKIEREDFLRKQRTFDNGSIPHQIHLQEMRAIIRRQAEFYPFLADNQDRIEKILTFRIPYYVGPLARGKSDFAWLSRKSADKITPWNFDEIVDKESSAEAFINRMTNYDLYLPNQKVLPKHSLLYEKFTVYNELTKVKYKTEQGKTAFFDANMKQEIFDGVFKVYRKVTKDKLMDFLEKEFDEFRIVDLTGLDKENKAFNASYGTYHDLRKILDKDFLDNSKNEKILEDIVLTLTLFEDREMIRKRLENYSDLLTKEQVKKLERRHYTGWGRLSAELIHGIRNKESRKTILDYLIDDGNSNRNFMQLINDDALSFKEEIAKAQVIGETDNLNQVVSDIAGSPAIKKGILQSLKIVDELVKIMGHQPENIVVEMARENQFTNQGRRNSQQRLKGLTDSIKEFGSQILKEHPVKHSQLQNDRLFLYYLQNGRDMYTGEELDIDYLSQYDIDHIIPQAFIKDNSIDNRVLTSSKENRGKSDDVPSKNVVRKMKSYWSKLLSAKLITQRKFDNLTKAERGGLTDDDKAGFIKRQLVETRQITKHVARILDERFHTETDENNKKIRQVKIVTLKSNLVSNFRKEFELYKVREINDYHHAHDAYLNAVIGKALLGVYPQLEPEFVYGDYPHFHGHKENKATAKKFFYSNIMNFFKKDDVRTDKNGEIIWKKDEHISNIKKVLSYPQVNIVKKVEEQTGGFSKESILPKGNSDKLIPRKTKKFYWDTKKYGGFDSPIVAYSILVIADIEKGKSKKLKTVKALVGVTIMEKMTFERDPVAFLERKGYRNVQEENIIKLPKYSLFKLENGRKRLLASARELQKGNEIVLPNHLGTLLYHAKNIHKVDEPKHLDYVDKHKDEFKELLDVVSNFSKKYTLAEGNLEKIKELYAQNNGEDLKELASSFINLLTFTAIGAPATFKFFDKNIDRKRYTSTTEILNATLIHQSITGLYETRIDLSKLGGD

SEQ ID NO: 155 - protein, 1345 aa, Streptococcus mutans
MKKPYSIGLDIGTNSVGWAVVTDDYKVPDKKMKVLGNTDKSHIKKNLLGALLFDSGNTAEDRRLKRTARRRYTRRRNRILYLQEIFSEEMGKVDDSFFHRLEDSFLVTEDKRGERHPIFGNLEEEVKYHENFPTIYHLRQYLADNPEKTDLRLVYLALAHIIKFRGHFLIEGKFDTRNNDVQRLFQEFLAVYDNTFENSSLQEQNVQVEEILTDKISKSAKKDRVLKLFPNEKSNGRFAEFLKLIVGNQADFKKHFELEEKAPLQFSKDIYEEELEVLLAQIGDNYAELFLSAKKLYDSILLSGILTVTDVSTKAPLSASMIQRYNEHQMDLAQLKQFIRQKLSDKYNEVFSDVSKDGYAGYIDGKTNQEAFYKYLKGLLNKIEGSGYFLDKIEREDFLRKQRTFDNGSIPHQIHLQEMRAIIRRQAEFYPFLADNQDRIEKILTFRIPYYVGPLARGKSDFAWLSRKSADKITPWNFDEIVDKESSVEAFINRMTNYDLYLPNQKVLPKHSLLYEKFTVYNELTKVKYKTEQGKTAFFDANMKQEIFDGVFKVYRKVTKDKLMDFLEKEFDEFRIVDLTGLDKENKAFNASYGTYHDLRKILDKDFLDNSKNEKILEDIVLTLTLFEDREMIRKRLKNYSDLLTKEQLKKLERRHYTGWGRLSAELIHGIRNKESRKTILDYLIDDGNSNRNFMQLINDDALSFKEEIAKAQVIGETDNLNQVVSDIAGSPAIKKGILQSLKIVDELVKIMGHQPENIVVEMARENQFTNQGRRNSQQRLKGLTDSIKEFGSQILKEHPVENSQLQNDRLFLYYLQNGRDMYTGEELDIDYLSQYDIDHIIPQAFIKDNSIDNRVLTSSKENRGKSDDVPSKDVVRKMKSYWSKLLSAKLITQRKFDNLTKAERGGLTDDDKAGFIKRQLVETRQITKHVARILDERFYTETDENNKKIRQVKIVTLKSNLVSNFRKEFELYKVREINDYHHAHDAYLNAVIGKALLGVYPQLEPEFVYGDYPHFHGHKENKATAKKFFYSNIMNFFKKDDVRTDKNGEIIWKKDEHISNIKKVLSYPQVNIVKKVEEQTGGFSKESILPKGNSDKLIPRKTKKFYWDTKKYGGFDSPIVAYSILVIADIEKGKSKKLKTVKALVGVTIMEKMTFERDPVAFLERKGYRNVQEENIIKLPKYSLFKLENGRKRLLASARELQKGNEIVLPNHLGTLLYHAKNIHKVDEPKHLDYVDKHKDEFKELLDVVSNFSKKYTLAEGNLEKIKELYAQNNGEDLKELASSFINLLTFTAIGAPATFKFFDKNIDRKRYTSTTEILNATLIHQSITGLYETRIDLSKLGGD

SEQ ID NO: 156 - protein, 1345 aa, Streptococcus mutans
MKKPYSIGLDIGTNSVGWAVVTDDYKVPAKKMKVLGNTDKSHIKKNLLGALLFDSGNTAADRRLKRTARRRYTRRRNRILYLQEIFAEEMSKVDDSFFHRLEDSFLVTEDKRGERHPIFGNLEEEVKYHENFPTIYHLRQYLADNPEKVDLRLVYLALAHIIKFRGHFLIEGKFDTRNNDVQRLFQEFLAVYDNTFENSSLQEQNVQVEEILTDKISKSAKKDRVLKLFPNEKSNGRFAEFLKLIVGNQADFKKHFELEEKAPLQFSKDTYEEELEVLLAQIGDNYAELFLSAKKLYDSILLSGILTVTDVSTKAPLSASMIQRYNEHQMDLAQLKQFIRQKLSDKYNEVFSDVSKDGYAGYIDGKTNQEAFYKYLKGLLNKIEGSGYFLDKIEREDFLRKQRTFDNGSIPHQIHLQEMRAIIRRQAEFYPFLADNQDRIEKILTFRIPYYVGPLARGKSDFAWLSRKSADKITPWNFDEIVDKESSAEAFINRMTNYDLYLPNQKVLPKHSLLYEKFTVYNELTKVKYKTEQGKTAFFDANMKQEIFDGVFKVYRKVTKDKLMDFLEKEFDEFRIVDLTGLDKENKAFNASYGTYHDLRKILDKDFLDNSKNEKILEDIVLTLTLFEDREMIRKRLENYSDLLTKEQVKKLERRHYTGWGRLSAELIHGIRNKESRKTILDYLIDDGNSNRNFMQLINDDALSFKEEIAKAQVIGETDNLNQVVSDIAGSPAIKKGILQSLKIVDELVKIMGHQPENIVVEMARENQFTNQGRRNSQQRLKGLTDSIKEFGSQILKEHPVENSQLQNDRLFLYYLQNGRDMYTGEELDIDYLSQYDIDHIIPQAFIKDNSIDNRVLTSSKENRGKSDDVPSKNVVRKMKSYWSKLLSAKLITQRKFDNLTKAERGGLTDDDKAGFIKRQLVETRQITKHVARILDERFHTETDENNKKIRQVKIVTLKSNLVSNFRKEFELYKVREINDYHHAHDAYLNAVIGKALLGVYPQLEPEFVYGDYPHFHGHKENKATAKKFFYSNIMNFFKKDDVRTDKNGEIIWKKDEHISNIKKVLSYPQVNIVKKVEEQTGGFSKESILPKGNSDKLIPRKTKKFYWDTKKYGGFDSPIVAYSILVIADIEKGKSKKLKTVKALVGVTIMEKMTFERDPVAFLERKGYRNVQEENIIKLPKYSLFKLENGRKRLLASARELQKGNEIVLPNHLGTLLYHAKNIHKVDEPKHLDYVDKHKDEFKELLDVVSNFSKKYTLAEGNLEKIKELYAQNNGEDLKELASSFINLLTFTAIGAPATFKFFDKNIDRKRYTSTTEILNATLIHQSITGLYETRIDLSKLGGD

SEQ ID NO: 157 - protein, 1345 aa, Streptococcus mutans
MKKPYSIGLDIGTNSVGWAVVTDDYKVPAKKMKVLGNTDKSHIEKNLLGALLFDSGNTAEDRRLKRTARRRYTRRRNRILYLQEIFSEEMGKVDDSFFHRLEDSFLVTEDKRGERHPIFGNLEEEVKYHENFPTIYHLRQYLADNPEKVDLRLVYLALAHIIKFRGHFLIEGKFDTRNNDVQRLFQEFLAVYDNTFENSSLQEQNVQVEEILTDKISKSAKKDRVLKLFPNEKSNGRFAEFLKLIIGNQADFKKHFELEEKAPLQFSKDTYEEELEVLLAQIGDNYAELFLSAKKLYDSILLSGILTVTDVGTQAPLSASMIQRYNEHQMDLAQLKQFIRQKLSDKYNEVFSDVSKDGYAGYIDGKTNQEAFYKYLKGLLNKIEGSGYFLDKIEREDFLRKQRTFDNGSIPHQIHLQEMRAIIRRQAEFYPFLADNQDRIEKLLTFRIPYYVGPLARGKSDFAWLSRKSADKITPWNFDEIVDKESSAEAFINRMTNYDLYLPNQKVLPKHSLLYEKFTVYNELTKVKYKTEQGKTAFFDANMKQEIFDGVFKVYRKVTKDKLMDFLEKEFDEFRIVDLTGLDKENKVFNASYGTYHDLCKILDKDFLDNSKNEKILEDIVLTLTLFEDREMIRKRLENYSDLLTKEQVKKLERRHYTGWGRLSAELIHGIRNKESRKTILDYLIDDGNSNRNFMQLINDDALSFKEEIAKAQVIGETDNLNQVVSDIAGSPAIKKGILQSLKIVDELVKIMGHQPENIVVEMARENQFTNQGRRNSQQRLKGLTDSIKEFGSQILKEHPVENSQLQNDRLFLYYLQNGRDMYTGEELDIDYLSQYDIDHIIPQAFIKDNSIDNRVLTSSKENRGKSDDVPSKDVVRKMKSYWSKLLSAKLITQRKFDNLTKAERGGLTDDDKAGFIKRQLVETRQITKHVARILDERFHTETDENNKKIRQVKIVTLKSNLVSNFRKEFELYKVREINDYHHAHDAYLNAVIGKALLGVYPQLEPEFVYGDYPHFHGHKENKATAKKFFYSNIMNFFKKDDVRTDKNGEIIWKKDEHISNIKKVLSYPQVNIVKKVEEQTGGFSKESILPKGNSDKLIPRKTKKFYWDTKKYGGFDSPIVAYSILVIADIEKGKSKKLKTVKALVGVTIMEKMTFERDPVAFLERKGYRNVQEENIIKLPKYSLFKLENGRKRLLASARELQKGNEIVLPNHLGTLLYHAKNIHKVDEPKHLDYVDKHKDEFKELLDVVSNFSKKYTLAEGNLEKIKELYAQNNGEDLKELASSFINLLTFTAIGAPATFKFFDKNIDRKRYTSTTEILNATLIHQSITGLYETRIDLNKLGGD

SEQ ID NO: 158 - protein, 1345 aa, Streptococcus mutans
MKKPYSIGLDIGTNSVGWAVVTDDYKVPAKKMKVLGNTDKSHIKKNLLGALLFDSGNTAEDRRLKRTARRRYTRRRNRILYLQEIFSEEMGKVDDSFFHRLEDSFLVTEDKRGERHPIFGNLEEEVKYHENFPTIYHLRQYLADNPEKVDLRLVYLALAHIIKFRGHFLIEGKFDTRNNDVQKLFQEFLAVYDNTFENSSLQEQNVQVEEILTDKISKSAKKDRVLKLFPNEKSNGRFAEFLKLIVGNQADFKKHFELEEKAPLQLSKDTYEEELEVLLAQIGDNYAELFLSAKKLYDSILLSGILTVTDVSTKAPLSASMIQRYNEHQMDLAQLKQFIRQKLSDKYNEVFSDVSKDGYAGYIDGKTNQEAFYKYLKGLLNKIEGSGYFLDKIEREDFLRKQRTFDNGSIPHQIHLQEMRAIIRRQAEFYPFLADNQDRIEKILTFRIPYYVGPLARGKSDFAWLSRKSADKITPWNFDEIVDKESSVEAFINRMTNYDLYLPNQKVLPKHSLLYEKFTVYNELTKVKYKTEQGKTAFFDANMKQEIFDGVFKVYRKVTKDKLMDFLEKEFDEFRIVDLTGLDKENKAFNASYGTYHDLRKILDKDFLDNSKNEKILEDIVLTLTLFEDREMIRKRLENYSDLLTKEQVKKLERRHYTGWGRLSAELIHGIRNKESRKTLLDYLIDDGNSNRNFMQLINDDALSFKEEIAKAQVIGETDNLNQVVSDIAGSPAIKKGILQSLKIVDELVKIMGHQPENIVVEMARENQFTNQGRRNSQQRLKGLTDSIKEFGSQILKEHPVENSQLQNDRLFLYYLQNGRDMYTGEELDIDYLSQYDIDHIIPQAFIKDNSIDNRVLTSSKENRGKSDDVPSKDVVRKMKSYWSKLLSAKLITQRKFDNLTKAERGGLTDDDKAGFIKRQLVETRQITKHVARILDERFNTETDENNKKIRQVKIVTLKSNLVSNFRKEFELYKVREINDYHHAHDAYLNAVIGKALLGVYPQLEPEFVYGDYPHFHGHKENKATAKKFFYSNIMNFFKKDDVRTDKNGEIIWKKDEYISNIKKVLSYPQVNIVKKVEEQTGGFSKESILPKGNSDKLIPRKTKKFYWDTKKYGGFDSPIVAYSILVIADIEKGKSKKLKTVKALVGVTIMEKMTFERDPIAFLERKGYRNVQEENIIKLPKYSLFKLENGRKRLLASARELQKGNEIVLPNHLGTLLYHAKNIHKVDEPKHLDYVDKHKDEFKELLDVVSNFSKKYTLAEGNLEKIKELYAQNNGEDLKELASSFINLLTFTAIGAPAAFKFFDKNIDRKRYTSTTEILNATLIHQSITGLYETRIDLSKLGGD

SEQ ID NO: 159 - protein, 1345 aa, Streptococcus mutans
MKKPYSIGLDIGTNSVGWAVVTDDYKVPAKKMKVLGNTDKSHIKKNLLGALLFDSGNTAEDRRLKRTARRRYTRRRNRILYLQEIFSEEMGKVDDSFFHRLEDSFLVTEDKRGECHPIFGNLEEEVKYHENFPTIYHLRQYLADNPEKTDLRLVYLALAHIIKFRGHFLIEGKFDTRNNDVQRLFQEFLAVYDNTFENSSLQEQNVQVEEILTDKISKSAKKDRVLKLFPNEKSNGRFAEFLKLIVGNQADFKKHFELEEKAPLQFSKDTYEEELEVLLAQIGDNYAELFLSAKKLYDSILLSGILTVTDVSTKAPLSASMIQRYNEHQMDLTQLKQFIRQKLSDKYNEVFSDVSKDGYAGYIDGKTNQEAFYKYLKGLLNKIEGNGYFLDKIEREDFLRKQRTFDNGSIPHQIHLQEMRAIIRRQAEFYPFLADNQDRIEKILTFRIPYYVGPLARGKSDFAWLSRKSADKITPWNFDEIVDKESSAEAFINRMTNYDLYLPNQKVLPKHSLLYEKFTVYNELTKVKYKTEQGKTAFFDANMKQEIFDGVFKVYRKVTKDKLMDFLEKEFDEFRIVDLTGLDKENKAFNASYGTYHDLRKILDKDFLDNSKNEKILEDIVLTLTLFEDREMIRKRLENYSDLLTKEQVKKLERRHYTGWGRLSAELIHGIRNKESRKTLLDYLIDDGNSNRNFMQLINDDALSFKEEIAKAQVIGETDNLNQVVSDIAGSPAIKKGILQSLKIVDELVKIMGHQPENIVVEMARENQFTNQGRRNSQQRLKGLTDSIKEFGSQILKEHPVENSQLQNDRLFLYYLQNGRDMYTGEELDIDYLSQYDIDHIIPQAFIKDNSIDNRVLTSSKENRGKSDDVPSKDVVRKMKPYWSKLLSAKLITQRKFDNLTKAERGGLTDDDKAGFIKRQLVETRQITKHVARILDERFNTETDENNKKIRQVKIVTLKSNLVSNFRKEFELYKVREINDYHHAHDAYLNAVIGKALLGVYPQLEPEFVYGDYPHFHGHEENKATAKKFFYSNIMNFFKKDDVRTDKNGEIIWKKDEHISNIKKVLSYPQVNIVKKVEEQTGGFSKESILPKGNSDKLIPRKTKKFYWDTKKYGGFDSPIVAYSILVIADIEKGKSKKLKTVKALVGVTIMEKMTFERDPVAFLERKGYRNVQEENIIKLPKYSLFKLENGRKRLLASARELQKGNEIVLPNHLGTLLYHAKNIHKVDEPKHLDYVDKHKDEFKELLDVVSNFSKKYTLAEGNLEKIKELYAQNNGEDLKELSSSFINLLTFTAIGAPAAFKFFDKNIDRKRYTSTTEILNATLIHQSITGLYETRIDLSKLGGD

SEQ ID NO: 160 - protein, 1345 aa, Streptococcus mutans
MKKPYSIGLDIGTNSVGWAVVTDDYKVPAKKMKVLGNTDKSHIEKNLLGALLFDSGNTAEDRRLKRTARRRYTRRRNRILYLQEIFSEEMGKVDDSFFHRLEDSFLVTEDKRGERHPIFGNLEEEVKYHENFPTIYHLRQYLADNPEKVDLRLVYLALAHIIKFRGHFLIEGKFDTRNNDVQRLFQEFLAVYDNTFENSSLQEQNVQVEEILTDKISKSAKKDRVLKLFPNEKSNGRFAEFLKLIVGNQADFKKHFELEEKVPLQFSKDTYEEELEVLLAQIGDNYAELFLSAKKLYDSILLSGILTVTDVGTKAPLSASMIQRYNEHQMDLAQLKQFIRQKLSDKYNEVFSDVSKDGYAGYIDGKTNQEAFYKYLKGLLNKIEGSGYFLDKIEREDFLRKQRTFDNGSIPHQIHLQEMRAIIRRQAEFYPFLADNQDRIEKLLTFRIPYYVGPLARGKSDFAWLSRKSADKITPWNFDEIVDKESSAEAFINRMTNYDLYLPNQKVLPKHSLLYEKFTVYNELTKVKYKTEQGKTAFFDANMKQEIFDGVFKVYRKVTKDKLMDFLEKEFDEFRIVDLTGLDKENKVFNASYGTYHDLCKILDKDFLDNSKNEKILEDIVLTLTLFEDREMIRKRLENYSDLLTKEQVKKLERRHYTGWGRLSAELIHGIRNKESRKTILDYLIDDGNSNRNFMQLINDDALSFKEEIAKAQVIGETDNLNQVVSDIAGSPAIKKGILQSLKIVDELVKIMGHQPENIVVEMARENQFTNQGRRNSQQRLKGLTDSIKEFGSQILKEHPVENSQLQNDRLFLYYLQNGRDMYTGEELDIDYLSQYDIDHIIPQAFIKDNSIDNRVLTSSKENRGKSDDVPSKDVVRKMKSYWSKLLSAKLITQRKFDNLTKAERGGLTDDDKAGFIKRQLVETRQITKHVARILDERFNTETDENNKKIRQVKIVTLKSNLVSNFRKEFELYKVREINDYHHAHDAYLNAVIGKALLGVYPQLEPEFVYGDYPHFHGHKENKATAKKFFYSNIMNFFKKDDVRTDKNGEIIWKKDEHISNIKKVLSYPQVNIVKKVEEQTGGFSKESILPKGNSDKLIPRKTKKFYWDTKKYGGFDSPIVAYSILVIADIEKGKSKKLKTVKALVGVTIMEKMTFERDPVAFLERKGYRNVQEENIIKLPKYSLFKLENGRKRLLASARELQKGNEIVLPNHLGTLLYHAKNIHKVDEPKHLDYVDKHKDEFKELLDVVSNFSKKYTLAEGNLEKIKELYAQNNGEDLKELASSFINLLTFTAIGAPATFKFFDKNIDRKRYTSTTEILNATLIHQSITGLYETRIDLNKLGGD

SEQ ID NO: 161 - protein, 1345 aa, Streptococcus mutans
MKKPYSIGLDIGTNSVGWAVVTDDYKVPAKKMKVLGNTDKSHIKKNLLGALLFDSGNTAEDRRLKRTARRRYTRRRNRILYLQEIFSEEMGKVDDSFFHRLEDSFLVTEDKRGERHPIFGNLEEEVKYHENFPTIYHLRQYLADNPEKTDLRLVYLALAHIIKFRGHFLIEGKFDTRNNDVQRLFQEFLAVYDNTFENSSLQEQNVQVEEILTDKISKSAKKDRVLKLFPNEKSNGRFAEFLKLIVGNQADFKKHFELEEKAPLQFSKDIYEEELEVLLAQIGDNYAELFLSAKKLYDSILLSGILTVTDVSTKAPLSASMIQRYNEHQMDLAQLKQFIRQKLSDKYNEVFSDVSKDGYAGYIDGKTNQEAFYKYLKGLLNKIEGSGYFLDKIEREDFLRKQRTFDNGSIPHQIHLQEMRAIIRRQAEFYPFLADNQDRIEKILTFRIPYYVGPLARGKSDFAWLSRKSADKITPWNFDEIVDKESSAEAFINRMTNYDLYLPNQKVLPKHSLLYEKFTVYNELTKVKYKTEQGKTAFFDANMKQEIFDGVFKVYRKVTKDKLMDFLEKEFDEFRIVDLTGLDKENKAFNASYGTYHDLRKILDKDFLDNSKNEKILEDIVLTLTLFEDREMIRKRLKNYSDLLTKEQLKKLERRHYTGWGRLSAELIHGIRNKESRKTILDYLIDDGNSNRNFMQLINDDALSFKEEIAKAQVIGETDNLNQVVSDIAGSLAIKKGILQNLKIVDELVKIMGHQPENIVVEMARENQFTNQGRRNSQQRLKGLTDSIKEFGSQILKEHPVENSQLQNDRLFLYYLQNGRDMYTGEELDIDYLSQYDIDHIIPQAFIKDNSIDNRVLTSSKENRGKSDDVPSKDVVRKMKSYWSKLLSAKLITQRKFDNLTKGERGGLTDDDKAGFIKRQLVETRQITKHVARILDERFNTETDENNKKIRQVKIVTLKSNLVSNFRKEFELYKVREINDYHHAHDAYLNAVIGKALLGVYPQLEPEFVYGDYPHFHGHKENKATAKKFFYSNIMNFFKKDDVRTDKNGEIIWKKDEYISNIKKVLSYPQVNIVKKVEEQTGGFFKESILPKGDSDKLIPRKTKKFYWDTKKYGGFDSPIVAYSILVIADIEKGKSKKLKTVKALVGVTIMEKMTFERDPVAFLERKGYRNVQEENIIKLPKYSLFKLENGRKRLLASARELQKGNEIVLPNHLGTLLYHAKNIHKVDEPKHLDYVDKHKDEFKELLDVVSNFSKKYTLAEGNLEKIKELYAQNNGEDLKELASSFINLLTFTAIGAPATFKFFDKNIDRKRYTSTTEILNATLIHQSITGLYETRIDLSKLGGD

SEQ ID NO: 162 - protein, 1345 aa, Streptococcus mutans
MKKPYSIGLDIGTNSVGWAVVTDDYKVPAKKMKVLGNTDKSHIEKNLLGALLFDSGNTAEDRRLKRTARRRYTRRRNRILYLQEIFSEEMGKVDDSFFHRLEDSFLVTEDKRGERHPIFGNLEEEVKYHENFPTIYHLRQYLADNPEKVDLRLVYLALAHIIKFRGHFLIEGKFDTRNNDVQRLFQEFLAVYDNTFENSSLQEQNVQVEEILTDKISKSAKKDRVLKLFPNEKSNGRFAEFLKLIVGNQADFKKHFELEEKAPLQFSKDTYEEELEVLLAQIGDNYAELFLSAKKLYDSILLSGILTVTDVGTKAPLSASMIQRYNEHQMDLAQLKQFIRQKLSDKYNEVFSDVSKDGYAGYIDGKTNQEAFYKYLKGLLNKIEGSGYFLDKIEREDFLRKQRTFDNGSIPHQIHLQEMRAIIRRQAEFYPFLADNQDRIEKLLTFRIPYYVGPLARGKSDFAWLSRKSADKITPWNFDEIVDKESSAEAFINRMTNYDLYLPNQKVLPKHSLLYEKFTVYNELTKVKYKTEQGKTAFFDANMKQEIFDGVFKVYRKVTKDKLMDFLEKEFDEFRIVDLTGLDKENKVFNASYGTYHDLCKILDKDFLDNSKNEKILEDIVLTLTLFEDREMIRKRLENYSDLLTKEQVKKLERRHYTGWGRLSAELIHGIRNKESRKTILDYLIDDGNSNRNFMQLINDDALSFKEEIAKAQVIGETDNLNQVVSDIAGSPAIKKGILQSLKIVDELVKIMGHQPENIVVEMARENQFTNQGRRNSQQRLKGLTDSIKEFGSQILKEHPVENSQLQNDRLFLYYLQNGRDMYTGEELDIDYLSQYDIDHIIPQAFIKDNSIDNRVLTSSKENRGKSDDVPSKDVVRKMKSYWSKLLSAKLITQRKFDNLTKAERGGLTDDDKAGFIKRQLVETRQITKHVARILDERFNTETDENNKKIRQVKIVTLKSNLVSNFRKEFELYKVREINDYHHAHDAYLNAVIGKALLGVYPQLEPEFVYGDYPHFHGHKENKATAKKFFYSNIMNFFKKDDVRTDKNGEIIWKKDEHISNIKKVLSYPQVNIVKKVEEQTGGFSKESILPKGNSDKLIPRKTKKFYWDTKKYGGFDSPIVAYSILVIADIEKSKSKKLKTVKALVGVTIMEKMTFERDPVAFLERKGYRNVQEENIIKLPKYSLFKLENGRKRLLASARELQKGNEIVLPNHLGTLLYHAKNIHKVDEPKHLDYVDKHKDEFKELLDVVSNFSKKYTLAEGNLEKIKELYAQNNGEDLKELASSFINLLTFTAIGAPATFKFFDKNIDRKRYTSTTEILNATLIHQSITGLYETRIDLNKLGGD

SEQ ID NO: 163 - protein, 1355 aa, Streptococcus mutans
MKKPYSIGLDIGTNSVGWAVVTDDYKVPAKKMKVLGNTDKSHIKKNLLGALLFDSGNTAEDRRLKRTARRRYTRRRNRILYLQEIFAEEMSKVDDSFFHRLDESFLTDDDKNFDSHPIFGNKAEEDAYHQKFPTIYHLRKHLADSTEKADLRLVYLALAHMIKFRGHFLIEGELNAENTDVQKLFADFVGVYDRTFDDSHLSEITVDASSILTEKISKSRRLEKLINNYPKEKKNTLFGNLIALSLGLQPNFKTNFKLSEDAKLQFSKDTYEEDLEELLGKIGDDYADLFTLAKNLYDAILLSGILTADDSSTKAPLSASMIKRYAEHHEDLEKLKEFIKANKPELYHDIFKDETKNGYAGYIENGVKQDEFYKYLKNTLSKITGSDYFLDQIEREDFLRKQRTFDNGSIPHQIHLQEMHAILRRQGDYYPFLKENQDRIEKILTFRIPYYVGPLARKNSRFAWAEYHSDEAVTPWNFDQVIDKESSAQAFIEHMTNNDLYLPNEKVLPKHSPLYEKYTVYNELTKIKYVTEIGEAKFFDANLKQEIFDGLFKHERKVTKKKLRTFLDKNFDEFRIVDIQGLDKETETFNASYATYQDLLKVIKDKVFMDNPENAEILENIVLTLTLFEDREMIKQRLAKYADVFDKKVIDQLARRHYTGWGRLSAKLLNGIRDKQSCKTIMDYLIDDAQSNRNLMQLITDDNLTFKDDIVKAQYVDNSDDLHQVVQSLAGSPAIKKGILQSLKIVDELVKVMGKEPEQIVVEMARENQTTAKGRRNSQQRYKRLKEAIKSLDRDLNHKILKEHPTDNQALQNNRLFLYYLQNGRDMYTGESLDINRLSDYDIDHVIPQAFIKDNSIDNRVLTSSKANRGKSDDVPSEDVVNRMRPFWNKLLSSGLISQRKYNNLTKKELTLDDKAGFIKRQLVETRQITKHVARMLDERFNKEFDDNNKRIRRVKIVTLKSNLVSSFRKEFELYKVREINDYHHAHDAYLNAVVVKALLVKYPKLEPEFVYGEYLKYNSYRERKTATQKMFFYSNIMNMFKSKVKLADDQIVERPMIEVNDETGEIAWDKTKHITTVKKVLSYPQVNIVKKVEEQTIGQNGGLFDDNPKSPLEVIPSKLVPLKKALNPEKYGGYQKPTTAYPILLIVDTKQLIPISVMDKKRFEQNPVKFLKDKGYQQIEKNNFVKLPKYTLVDIGNGIKRLWASSKEVHKGNQLVVSKKSQDLLYHAHHLDNDYSNEYVKNHYQQFDILFNEITSFSKKCKLGKEHIQKIEEAYSKERDFASIEELADGFIKLLGFTQLGATSPFSFLGIKLNQKQYTGKKDYLLPCMEATLIHQSITGLYETRIDLSKLGGD

SEQ ID NO: 164 - protein, 1345 aa, Streptococcus mutans
MKKPYSIGLDIGTNSVGWAVVTDDYKVPAKKMKVLGNTDKSHIKKNLLGALLFDSGNTAADRRLKRTARRRYTRRRNRILYLQEIFAEEMSKVDDSFFHRLEDSFLVTEDKRGERHPIFGNLEEEVKYHENFPTIYHLRQYLADNPEKVDLRLVYLALAHIIKFRGHFLIEGKFDTRNNDVQRLFQEFLAVYDNTFENSSLQEQNVQVEEILTDKISKSAKKDRVLKLFPNEKSNGRFAEFLKLIVGNQADFKKHFELEEKAPLQFSKDTYEEELEVLLAQIGDNYAELFLSAKKLYDSILLSGILTVTDVSTKAPLSASMIQRYNEHQMDLVQLKQFIRQKLSDKYNEVFSDVSKDGYAGYIDGKTNQEAFYKYLKGLLNKIEGSGYFLDKIEREDFLRKQRTFDNGSIPHQIHLQEMRAIIRRQAEFYPFLADNQDRIEKILTFRIPYYVGPLARGKSDFAWLSRKSADKITPWNFDEIVDKESSAEAFINRMTNYDLYLPNQKVLPKHSLLYEKFTVYNELTKVKYKTEQGKTAFFDANMKQEIFDGVFKVYRKVTKDKLMDFLEKEFDEFRIVDLTGLDKENKAFNASYGTYHDLRKILDKDFLDNSKNEKILEDIVLTLTLFEDREMIRKRLENYSDLLTKEQVKKLERRHYTGWGRLSAELIHGIRNKESRKTILDYLIDDGNSNRNFMQLINDDALSFKEEIAKAQVIGETDNLNQVVSDIAGSPAIKKGILQSLKIVDELVKIMGHQPENIVVEMARENQFTNQGRRNSQQRLKGLTDSIKEFGSQILKEHPVEHSQLQNDRLFLYYLQNGRDMYTGEELDIDYLSQYDIDHIIPQAFIKDNSIDNRVLTSSKENRGKSDDVPSKNVVRKMKSYWSKLLSAKLITQRKFDNLTKAERGGLTDDDKAGFIKRQLVETRQITKHVARILDERFHTETDENNKKIRQVKIVTLKSNLVSNFRKEFELYKVREINDYHHAHDAYLNAVIGKALLGVYPQLEPEFVYGDYPHFHGHKENKATAKKFFYSNIMNFFKKDDVRTDKNGEIIWKKDEHISNIKKVLSYPQVNIVKKVEEQTGGFSKESILPKGNSDKLIPRKTKKFYWDTKKYGGFDSPIVAYSILVIADIEKGKSKKLKTVKALVGVTIMEKMTFERDPVAFLERKGYRNVQEENIIKLPKYSLFKLENGRKRLLASARELQKGNEIVLPNHLGTLLYHAKNIHKVDEPKHLDYVDKHKDEFKELLDVVSNFSKKYTLAEGNLEKIKELYAQNNGEDLKELASSFINLLTFTAIGAPATFKFFDKNIDRKRYTSTTEILNATLIHQSITGLYETRIDLSKLGGD

SEQ ID NO: 165 - protein, 1345 aa, Streptococcus mutans
MKKPYSIGLDIGTNSVGWAVVTDDYKVPAKKMKVLGNTDKSHIKKNLLGALLFDSGNTAEDRRLKRTTRRRYTRRRNRILYLQEIFSEEMGKVDDSFFHRLEDSFLVTEDKRGERHPIFGNLEEEVKYHENFPTIYHLRQYLADNPEKTDLRLVYLALAHIIKFRGHFLIEGKFDTRNNDVQRLFQEFLAVYDNTFENSSLQEQNVQVEEILTDKISKSAKKDRVLKLFPNEKSNGRFAEFLKLIVGNQADFKKHFELEEKAPLQFSKDTYEEELEVLLAQIGDNYAELFLSAKKLYDSILLSGILTVTDVSTKAPLSASMIQRYNEHQMDLTQLKQFIRQKLSDKYNEVFSDVSKDGYAGYIDGKTNQEAFYKYLKGLLNKIEGSGYFLDKIEREDFLRKQRTFDNGSIPHQIHLQEMRAIIRRQAEFYPFLADNQDRIEKLLTFRIPYYVGPLASGKSDFAWLSRKSADKITPWNFDEIVDKESSAEAFINRMTNYDLYLPNQKVLPKHSLLYEKFTVYNELTKVKYKTEQGKTAFFDANMKQEIFDGVFKVYRKVTKDKLMDFLEKEFDEFRIVDLTGLDKENKVFNASYGTYHDLCKILDKDFLDNSKNEKILEDIVLTLTLFEDREMIRKRLENYSDLLTKEQVKKLERRHYTGWGRLSAELIHGIRNKESRKTILDYLIDDGNSNRNFMQLINDDALSFKEEIAKAQVIGETDNLNQVVSDIAGSPAIKKGILQSLKIVDELVKIMGHQPENIVVEMARENQFTNQGRRNSQQRLKGLTDSIKEFGSQILKEHPVENSQLQNDRLFLYYLQNGRDMYTGEELDIDYLSQYDIDHIIPQAFIKDNSIDNRVLTSSKENRGKSDDVPSKDVVRKMKSYWSKLLSAKLITQRKFDNLTKAERGGLTDDDKAGFIKRQLVETRQITKHVARILDERFNTETDENNKKIRQVKIVTLKSNLVSNFRKEFELYKVREINDYHHAHDAYLNAVIGKALLGVYPQLEPEFVYGDYPHFHGHKENKATAKKFFYSNIMNFFKKDDVRTDKNGEIIWKKDEHISNIKKVLSYPQVNIVKKVEEQTGGFSKESILPKGNSDKLIPRKTKKFYWDTKKYGGFDSPIVAYSILVIADIEKGKSKKLKTVKALVGVTIMEKMTFERDPVAFLERKGYRNVQEENIIKLPKYSLFKLENGRKRLLASARELQKGNEIVLPNHLGTLLYHAKNIHKVDEPKHLDYVDKHKDEFKELLDVVSNFSKKYTLAEGNLEKIKELYAQNNGEDLKELASSFINLLTFTAIGAPATFKFFDKNIDRKRYTSTTEILNATLIHQSITGLYETRIDLSKLGGD

SEQ ID NO: 166 - protein, 1355 aa, Streptococcus mutans
MKKPYSIGLDIGTNSVGWAVVTDDYKVPAKKMKVLGNTDKSHIKKNLLGALLFDSGNTAADRRLKRTARRRYTRRRNRILYLQEIFAEEMNKVDDSFFHRLDESFLTDDDKNFDSHPIFGNKAEEDAYHQKFPTIYHLRKHLADSTEKADLRLVYLALAHMIKFRGHFLIEGELNAENTDVQKLFADFVGVYDRTFDDSHLSEITVDASSILTEKISKSRRLEKLINNYPKEKKNTLFGNLIALSLGLQPNFKTNFKLSEDAKLQFSKDTYEEDLEELLGKIGDDYADLFTLAKNLYDAILLSGILTADDSSTKAPLSASMIKRYAEHHEDLEKLKEFIKANKPELYHDIFKDETKNGYAGYIENGVKQDEFYKYLKNTLSKIAGSDYFLDKIEREDFLRKQRTFDNGSIPHQIHLQEMHAILRRQGDYYPFLKENQDRIEKILTFRIPYYVGPLARKNSRFAWAEYHSDEAVTPWNFDQVIDKESSAQAFIEHMTNNDLYLPNEKVLPKHSPLYEKYTVYNELTKIKYVTEIGEAKFFDANLKQEIFDGLFKHERKVTKKKLRTFLDKNFDEFRIVDIQGLDKETETFNASYATYQDLLKVIKDKVFMDNPENAEILENIVLTLTLFEDREMIKQRLAKYADVFDKKVIDQLARRHYTGWGRLSAKLLNGIRDKQSCKTIMDYLIDDAQSNRNLMQLITDDNLTFKDDIVKAQYVDNSDDLHQVVQSLAGSPAIKKGILQSLKIVDELVKVMGKEPEQIVVEMARENQTTAKGRRNSQQRYKRLKEAIKSLDRDLNHKILKEHPTDNQALQNNRLFLYYLQNGRDMYTGESLDINRLSDYDIDHVIPQAFIKDNSIDNRVLTSSKANRGKSDDVPSEDVVNRMRPFWNKLLSSGLISQRKYNNLTKKELTLDDKAGFIKRQLVETRQITKHVARMLDERFNKEFDDNNKRIRRVKIVTLKSNLVSSFRKEFELYKVREINDYHHAHDAYLNAVVVKALLVKYPKLEPEFVYGEYPKYNSYRERKTATQKMFFYSNIMNMFKSKVKLADDQIVERPMIEVNDETGEIAWDKTKHITTVKKVLSYPQVNIVKKVEEQTIGQNGGLFDDNPKSPLEVIPSKLVPLKKALNPEKYGGYQKPTTAYPILLIVDTKQLIPISVMDKKRFEQNPVKFLKDKGYQQIEKNNFVKLPKYTLVDIGNGIKRLWASSKEVHKGNQLVVSKKSQDLLYHAHHLDNDYSNEYVKNHYQQFDILFNEITSFSKKCKLGKEHIQKIEEAYSKERDSASIEELADGFIKLLGFTQLGATSPFSFLGIKLNQKQYTGKKDYLLPCMEATLIHQSITGLYETRIDLSKLGGD

SEQ ID NO: 167 - protein, 1345 aa, Streptococcus mutans
MKKPYSIGLDIGTNSVGWAVVTDDYKVPAKKMKVLGNTDKSHIKKNLLGALLFDSGNTAADRRLKRTARRRYTRRRNRILYLQEIFAEEMSKVDDSFFHRLEDSFLVTEDKRGERHPIFGNLEEEVKYYENFPTIYHLRQYLADNPEKVDLRLVYLALAHIIKFRGHFLIEGKFDTRNNDVQRLFQEFLAVYDNTFENSSLQEQNVQVEEILTDKISKSAKKDRVLKLFPNEKSNGRFAEFLKLIVGNQADFKKHFELEEKAPLQFSKDTYEEDLEELLGKIGDDYADLFTLAKNLYDAILLSGILTADDSSTKAPLSASMIQRYNEHQMDLAQLKQFIRQKLSDKYNEVFSDVSKDGYAGYIDGKTNQEAFYKYLKGLLNKIEGSGYFLDKIEREDFLRKQRTFDNGSIPHQIHLQEMRAIIRRQAEFYPFLADNQDRIEKILTFRIPYYVGPLARGKSDFAWLSRKSADKITPWNFDEIVDKESSAEAFINRMTNYDLYLPNQKVLPKHSLLYEKFTVYNELTKVKYKTEQGKTAFFDANMKQEIFDGVFKVYRKVTKDKLMDFLEKEFDEFRIVDLTGLDKENKVFNASYGTYHDLCKILDKDFLDNSKNEKILEDIVLTLTLFEDREMIRKRLENYSDLLTKEQVKKLERRHYTGWGRLSAELIHGIRNKESRKTILDYLIDDGNSNRNFMQLINDDALSFKEEIAKAQVIGETDNLNQVVSDIAGSPAIKKGILQSLKIVDELVKIMGHQPENIVVEMARENQFTNQGRRNSQQRLKGLTDSIKEFGSQILKEHPVENSQLQNDRLFLYYLQNGRDMYTGEELDIDYLSQYDIDHIIPQAFIKDNSIDNRVLTSSKENRGKSDDVPSKDVVRKMKPYWSKLLSAKLITQRKFDNLTKAERGGLTDDDKAGFIKRQLVETRQITKHVARILDERFNTETDENNKKIRQVKIVTLKSNLVSNFRKEFELYKVREINDYHHAHDAYLNAVIGKALLGVYPQLEPEFVYGDYPHFHGHEENKATAKKFFYSNIMNFFKKDDVRTDKNGEIIWKKDEHISNIKKVLSYPQVNIVKKVEEQTGGFSKESILPKGNSDKLIPRKTKKFYWDTKKYGGFDSPIVAYSILVIADIEKGKSKKLKTVKALVGVTIMEKMTFERDPVAFLERKGYRNVQEENIIKLPKYSLFKLENGRKRLLASARELQKGNEIVLPNHLGTLLYHAKNIHKVDEPKHLDYVDKHKDEFKELLDVVSNFSKKYTLAEGNLEKIKELYAQNNGEDLKELASSFINLLTFTAIGAPATFKFFDKNIDRKRYTSTTEILNATLIHQSITGLYETRIDLSKLGGD

SEQ ID NO: 168 - protein, 1345 aa, Streptococcus mutans
MKKPYSIGLDIGTNSVGWAVVTDDYKVPAKKMKVLGNTDKSHIKKNLLGALLFDSGNTAEDRRLKRTTRRRYTRRRNRILYLQEIFSEEMGKVDDSFFHRLEDSFLVTEDKRGERHPIFGNLEEEVKYHENFPTIYHLRQYLADNPEKTDLRLVYLALAHIIKFRGHFLIEGKFDTRNNDVQRLFQEFLAVYDNTFENSSLQEQNVQVEEILTDKISKSAKKDRVLKLFPNEKSNGRFAEFLKLIVGNQADFKKHFELEEKAPLQFSKDTYEEELEVLLAQIGDNYAELFLSAKKLYDSILLSGILTVTDVSTKAPLSASMIQRYNEHQMDLTQLKQFIRQKLSDKYNEVFSDVSKDGYAGYIDGKTNQEAFYKYLKGLLNKIEGSGYFLDKIEREDFLRKQRTFDNGSIPHQIHLQEMRAIIRRQAEFYPFLADNQDRIEKLLTFRIPYYVGPLASGKSDFAWLSRKSADKITPWNFDEIVDKESSAEAFINRMTNYDLYLPNQKVLPKHSLLYEKFTVYNELTKVKYKTEQGKTAFFDANMKQEIFDGVFKVYRKVTKDKLMDFLEKEFDEFRIVDLTGLDKENKVFNASYGTYHDLCKILDKDFLDNSKNEKILEDIVLTLTLFEDREMIRKRLENYSDLLTKEQVKKLERRHYTGWGRLSAELIHGIRNKESRKTILDYLIDDGNSNRNFMQLINDDALSFKEEIAKAQVIGETDNLNQVVSDIAGSPAIKKGILQSLKIVDELVKIMGHQPENIVVEMARENQFTNQGRRNSQQRLKGLTDSIKEFGSQILKEHPVENSQLQNDRLFLYYLQNGRDMYTGEELDIDYLSQYDIDHIIPQAFIKDNSIDNRVLTSSKENRGKSDDVPSKDVVRKMKSYWSKLLSAKLITQRKFDNLTKAERGGLTDDDKAGFIKRQLVETRQITKHVARILDERFNTETDENNKKIRQVKIVTLKSNLVSNFRKEFELYKVREINDYHHAHDAYLNAVIGKALLGVYPQLEPEFVYGDYPHFHGHKENKATAKKFFYSNIMNFFKKDDVRTDKNGEIIWKKDEHISNIKKVLSYPQVNIVKKVEEQTGGFSKESILPKGNSDKLIPRKTKKFYWDTKKYGGFDSPIVAYSILVIADIEKGKSKKLKTVKALVGVTIMEKMTFERDPVAFLERKGYRNVQEENIIKLPKYSLFKLENGRKRLLASARELQKGNEIVLPNHLGTLLYHAKNIHKVDEPKHLDYVDKHKDEFKELLDVVSNFSKKYTLAEGNLEKIKELYAQNNGEDLKELASSFINLLTFTAIGAPATFKFFDKNIDRKRYTSTTEILKATLIHQSITGLYETRIDLSKLGGD

SEQ ID NO: 169 - protein, 1338 aa, Streptococcus mutans NLML4
MDLIGTNSVGWAVVTDDYKVPAKKMKVLGNTDKSHIKKNLLGALLFDSGNTAADRRLKRTARRRYTRRRNRILYLQEIFAEEMSKVDDSFFHRLEDSFLVTEDKRGERHPIFGNLEEEVKYHENFPTIYHLRQYLADNPEKVDLRLVYLALAHIIKFRGHFLIEGKFDTRNNDVQRLFQEFLAVYDNTFENSSLQEQNVQVEEILTDKISKSAKKDRVLKLFPNEKSNGRFAEFLKLIVGNQADFKKHFELEEKAPLQFSKDTYEEELEVLLAQIGDNYAELFLSAKKLYDSILLSGILTVTDVSTKAPLSASMIQRYNEHQMDLAQLKQFIRQKLSDKYNEVFSDVSKDGYAGYIDGKTNQEAFYKYLKGLLNKIEGSGYFLDKIEREDFLRKQRTFDNGSIPHQIHLQEMRAIIRRQAEFYPFLADNQDRIEKILTFRIPYYVGPLARGKSDFAWLSRKSADKITPWNFDEIVDKESSAEAFINRMTNYDLYLPNQKVLPKHSLLYEKFTVYNELTKVKYKTEQGKTAFFDANMKQEIFDGVFKVYRKVTKDKLMDFLEKEFDEFRIVDLTGLDKENKAFNASYGTYHDLRKILDKDFLDNSKNEKILEDIVLTLTLFEDREMIRKRLENYSDLLTKEQVKKLERRHYTGWGRLSAELIHGIRNKESRKTILDYLIDDGNSNRNFMQLINDDALSFKEEIAKAQVIGETDNLNQVVSDIAGSPAIKKGILQSLKIVDELVKIMGHQPENIVVEMARENQFTNQGRRNSQQRLKGLTDSIKEFGSQILKEHPVEHSQLQNDRLFLYYLQNGRDMYTGEELDIDYLSQYDIDHIIPQAFIKDNSIDNRVLTSSKENRGKSDDVPSKNVVRKMKSYWSKLLSAKLITQRKFDNLTKAERGGLTDDDKAGFIKRQLVETRQITKHVARILDERFHTETDENNKKIRQVKIVTLKSNLVSNFRKEFELYKVREINDYHHAHDAYLNAVIGKALLGVYPQLEPEFVYGDYPHFHGHKENKATAKKFFYSNIMNFFKKDDVRTDKNGEIIWKKDEHISNIKKVLSYPQVNIVKKVEEQTGGFSKESILPKGNSDKLIPRKTKKFYWDTKKYGGFDSPIVAYSILVIADIEKGKSKKLKTVKALVGVTIMEKMTFERDPVAFLERKGYRNVQEENIIKLPKYSLFKLENGRKRLLASARELQKGNEIVLPNHLGTLLYHAKNIHKVDEPKHLDYVDKHKDEFKELLDVVSNFSKKYTLAEGNLEKIKELYAQNNGEDLKELASSFINLLTFTAIGAPATFKFFDKNIDRKRYTSTTEILNATLIHQSITGLYETRIDLSKLGGD

SEQ ID NO: 170 - protein, 1373 aa, Streptococcus oralis
MENKNYSIGLDIGTNSVGWAVITDDYKVPSKKMKVLGNTDKRFIKKNLIGALLFDEGTTAEARRLKRTARRRYTRRKNRLRYLQEIFAEEMSKVDSSFFHRLDDSFLIPEDKKGSKYPIFATLIEEKEYHKQFPTIYHLRKQLADSKEKTDLRLIYLALAHMIKYRGHFLYEDTFDIKNNDIQKIFNEFISIYNNTFEGNSLSGQNVQVEAIFTDKISKSAKRERVLKLFPDEKSTGLFSEFLKLIVGNQADFKKHFDLEEKAPLQFSRDTYDEDLENLLGQIGDDFADLFVAAKKLYDAILLSGILTVTDPSTKAPLSASMIERYENHQKDLATLKQFIKTNLPEKYDEVFSDQSKDGYAGYIDGKTTQESFYKYIKNLLSKFEGADYFLEKIEREDFLRKQRTFDNGSIPHQIHLQEMNAILRRQGEHYPFLKENKEKIEKILTFRIPYYVGPLARGNRDFAWLTRNSDQAIRPWNFEEIVDKASSAESFINKMTNYDLYLPEEKVLPKHSLLYETFAVYNELTKVKFIAEGLRDYQFLDSRQKKDIFYTLFKAEDKRKVTEKDIIQYLHTVDGYDGIELKGIEKQFNASLSTYHDLLKIIKDKEFMDDPNNEEILENIVHTLTIFEDREMIKQRLAQYDSLFDEKVIKALTRRHYTGWGKLSSKLINGIRDKQTGKTILDYLMDDGYNNRNFMQLINDDELSFKEIIKKAQVVGKTDDVKQVVQELPGSPAIKKGILQSIKLVDELVKVMGHEPESIVIEMARENQTTARGKKNSQQRYKRIEDSLKILASGLNAKILKEHPTDNIQLQNDRLFLYYLQNGRDMYTGKPLDINQLSSYDIDHIVPQAFIKDDSLDNRVLTSLKDNRGKSDNVPSLEVVEKMKTFWQQLLDSKLISYRKFNNLTKAERGGLDERDKVGFIKRQLVETRQITKHVAQILDARYNTEVNEKDKKNRTVKIITLKSNLVSNFRKEFRLYKIREINDYHHAHDAYLNAVVAKAILKKYPKLEPEFVYGDYQKYDLKRYISRSKDPKEIEKATEKYFFYSNLLNFFKEEVHYADGTIVKRENIEYSKDTGEIAWNKEKDFATIKKVLSLPQVNIVKKREVQTGGFSKESILPKGNSDKLIPRKTKDILWDTTKYGGFDSPVIAYSILLIADIEKGKAKRLKTVKTLVGITIMEKATFEKSPIAFLENKGYHNVRKENILCLPKYSLFELKNGRRRMLASAKELQKGNEIVLPVHLTTLLYHAKNIHRLDEPEHLEYIQKHRNEFKGLLNLVSEFSQKYVLADANLEKIKNLYADNEQADIEILANSFINLLTFTALGAPAAFKFFGKDVDRKRYTTVSEILNATLIHQSITGLYETRIDLSKLGED

SEQ ID NO: 171 - protein, 1371 aa, Streptococcus oralis
MENKNYSIGLDIGTNSVGWSVITDDYKVPSKKMKVLGNTDKRFIKKNLIGALLFDEGTTAEARRLKRTARRRYTRRKNRLRYLQEIFAEEMSKVDSSFFHRLDDSFLIPEDKRGSKYPIFATLAEEKEYHKQFPTIYHLRKQLADSKEKTDLRLIYLALAHMIKYRGHFLYEDTFDIKNNDIQKIFSEFISIYDNTFEGSSLSGQNAQVEAIFTDKISKSAKRERVLKLFPDEKSTGLFSEFLKLIVGNQADFKKHFDLGEKAPLQFSKDTYDEDLENLLGQIGDDFADLFLVAKKLYDAILLSGILTVTDPSTKAPLSASMIERYENHQKDLAVLKQFIKNNLPEKYDEVFSDQSKDGYAGYIDGKTTQEAFYKYIKNLLSKFEGTDYFLEKIEREDFLRKQRTFDNGSIPHQIHLQEMNAILRRQGEHYPFLKDNKEKIEKILTFRIPYYVGPLARGNRDFAWLTRNSDEAIRPWNFEEIVDKASSAEDFINKMTNYDLYLPEEKVLPKHSLLYETFAVYNELTKVKFIAEGLRDYQFLDSGQKKQIVTQLFKEKRKVTEKDIIQFLHNVDGYDGIELKGIEKQFNASLSTYHDLLKIIKDKEFMDDSKNEEILENIVHTLTIFEDREMIKQRLAQYDSLFDEKVIKALIRRHYTGWGKLSAKLIDGICDKQTGNTILDYLIDDGKNNRNFMQLINDDGLSFKEITQKAQVVGKTDDVKQVVQELPGSPAIKKGILQSIKIVDELVKVMGHTPESIVIEMARENQTTARGKKNSQQRYKRIEDALKNLASGLDSNILKEHPTNNIQLQNDRLFLYYLQNGRDMYTGKPLDINQLSSYDIDHIVPQAFIKDDSLDNRVLTSLKDNRGKSDNVPSIEVVQKRKAFWQQLLDSKLISERKFNNLTKAERGGLDERDKVGFIKRQLVETRQITKHVAQILDARFNKEVNEKDKKNRTVKIITLKSNLVSNFRKEFRLYKVREINDYHHAHDAYLNAVVAKAILKKYPKLEPEFVYGDYQKYDLKRYISRSRNPKEVEKATEKYFFYSNLLNFFKEEVHYADGTIVKRENIEYSKDTGEIAWNKEKDFATIKKVLSYPQVNIVKKREVQTGGFSKESILPKGNSDKLIPRKTKDILWETTKYGGFDSPVIAYSILLIADIEKGKAKKLKTVKTLVGITIMEKAAFEENPITFLENKGYHNVRKENILCLPKYSLFELENGRRRLLASAKELQKGNEIVLPVYLTTLLYHSKNVHKLDEPEHLEYIQKHRNEFKDLLNLVSEFSQKYVLADANLEKIQNLYADNEQADIEILANSFINLLTFTALGAPAAFKFFGKDIDRKRYTTVSEILNATLIHQSITGLYETRIDLSKLGED

SEQ ID NO: 172 - protein, 1366 aa, Streptococcus parasanguinis
MKKPYSIGLDIGTNSVGWAVITDDYKVPAKKMKVLGNTNKESIKKNLIGALLFDAGNTAADRRLKRTARRRYTRRRNRILYLQEIFAAEMNKVDESFFHRLDDSFLVPEDKRGSKYPIFGTLEEEKEYHKQFPTIYYLRKILADSKEKVDLRLIYLALAHIIKYRGHFLYEDSFDIKNNDIQKIFNEFTILYDNTFEESSLSKGNAQVEEIFTDKISKSAKRDRVLKLFPDEKSTGLFSEFLKLIVGNQADFKKHFDLEEKAPLQFSKDTYEEDLESLLGQIGDVYADLFVVAKKLYDAILLAGILSVKDPGTKAPLSASMIERYDNHQNDLSALKQFVRRNLPEKYAEVFSDDSKDGYAGYIDGKTTQEGFYKYIKNLISKIEGAEYFLEKIEREDFLRKQRTFDNGSIPHQIHLQEMNAILRHQGEYYPFLKENKDKIEQILTFRIPYYVGPLARGNSDFAWLSRNSDEAIRPWNFEEMVDKSSSAEDFIHRMTNYDLYLPEEKVLPKHSLLYETFTVYNELTKVKYIAEGMKDYQFLDSGQKKQIVNQLFKEKRKVTEKDIIHYLHNVDGYDGIELKGIEKHFNSSLSTYHDLLKIIKDKEFMDDPKNEEIFENIVHTLTIFEDRVMIKQRLNQYDSIFDEKVIKALTRRHYTGWGKLSAKLINGIRDKKTSKTILDYLIDDGYSNRNFMQLINDDGLSFKETIQKAQVVGETNDVKQVVQELPGSPAIKKGILQSIKIVDELVKVMGHAPESVVIEMARENQTTNKGKSKSQQRLKTLSDAISELGSNILKEHPTDNIQLQNDRLFLYYLQNGKDMYTGEALDINQLSNYDIDHIIPQAFIKDDSLDNRVLTSSKDNRGKSDNVPSLEIVEKMKGFWQQLLDSKLISERKFNNLTKAERGGLDERDKVGFIKRQLVETRQITKHVAQILDDRFNAEVNEKNQKLRSVKIITLKSNLVSNFRKEFGLYKVREINDYHHAHDAYLNAVVAKAILKKYPKLEPEFVYGDYQKYDLKRYISRTKDPKEIEKATEKYFFYSNLLNFFKDKVYYADGTIIQRGNVEYSKDTGEIAWNKKRDFAIVRKVLSYPQVNIVKKTEEQTGGFSKESILPKGNSDKLIPRKTKNVQLDTTKYGGFDSPVIAYSILLVADVEKGKSKKLKTVKSLIGITIMEKVKFEANPVAFLEGKGYQNVVEENIIRLPKYSLFELENGRRRMLASAKELQKGNEMVLPSYLIALLYHAKRIQKKDEPEHLEYIKQHHSEFNDLLNFVSEFSQKYVLAESNLEKIKNLYIDNEQTNMEEIANSFINLLTFTAFGAPAVFKFFGKDIERKRYSTVTEILKATLIHQSLTGLYETRIDLSKLGEE

SEQ ID NO: 173 - protein, 1337 aa, Streptococcus parauberis
MKVLGNTDRQTVKKNMIGTLLFDSGETAEARRLKRTARRRYTRRINRIKYLQSIFDDEMSKIDSAFFQRIKDSFLVPDDKNDDRHPIFGNIKDEVDYHKNYPTIYHLRKKLADSDEKADLRLIYLALAHIIKFRGHFLIEGDLDSQNTDVNALFLKLVDTYNLMFEDDKIDTQTIDATVILTEKMSKSRRLENLIAKIPNQKKNTLFGNLISLSLGLTPNFKANFELSEDAKLQISKESFEEDLDNLLAQIGDQYADLFIAAKNLSDAILLSDILTVKGVNTKAPLSASMVQRFNEHQDDLKLLKKLVKVQLPEKYKEIFDIKDKNGYAGYINGKTSQEDFYKYIKPILSKLKGAESLISKLEREDFLRKQRTFDNGSIPHQIHLNELKSIIRRQEKYYPFLKDKQVRIEKIFTFRIPYFVGPLANGNSSFAWVKRRSNESITPWNFEEVVEQEASAKVFIERMTNFDTYLPEEKVLPKHSLLYEMFTVYNELTKVKYQAEGMRKPEFLSSEEKIEIVSNLFKTERKVTVKQLKENYFNKIRCLDSITISGVEDKFNASLGTYHDLLNIIKNQKILDDEQNQDSLEDIVLTLTLFEDEKMIAKRLSKYESIFDPSILKKLKKRHYTGWGRLSQKLINGIRDKQTGKTILDFLIEDGQANRNFMQLINDPSLDFASIIKEAQEKTIKSEKLEETIANLAGSPAIKKGILQSVKIVDEVVKVMGYEPSNIVIEMARENQSTQRGINNSRERLRKLEEVHKNIGSKILKEHEISNAQLQSDRVYLYLLQDGKDMYTGKDLDFDRLSQYDIDHIIPQSFIKDNSIDNIVLTSQESNRGKSDNVPYIAIVNKMKSYWQHQLKSGAISQRKFDNLTKAERGGLSEYDKAGFIKRQLVETRQITKHVAQILNNRFNNNVDDSSKNKRPVKIITLKSKMVSDFRKEFGFYKIREVNDYHHAHDAYLNAVVGTALLKKYPKLEAEFVYGDYKHYDLASLVVKSDTSLGKATAKMFFYSNIMNFFKKEVRLADGTVITRPQIETNTETGEIVWDKVKDIKTIRKVLSIPQINVVKKTEVQTGGFSKESILSKRDSDKLIPRKNNWDPKKYGGFGSPIIAYSVLVVAKVTKGKSQKTKSVKELVGITIMEQNEFEKDRITFLEKKGYQDIQESLIIKLPKFSLFELENGRKRLLASAKELQKGNELSLPNKYIQFLYLASRYTSFSGKEEDREKHRHFVESHLHYFDEIKDIIADFSRRYILADANLEKILTLYNEKNQFSIEEQATNMLNLFTFTGLGAPATLKFFNVDIDRKRYTSSTEILNSTLIRQSITGLYETRIDLSKIGGD

SEQ ID NO: 174 - protein, 1368 aa, Streptococcus phocae
MVEKKSYSIGLDIGTNSVGWAVITDDYKVPAKKMKVLGNTSRQSIKKNMIGALLFDEGGPAASTRVKRTTRRRYTRRKNRLCYLRDIFESEMHTIDKHFFLRLEDSFLHKSDKRYEAHPIFGTLQEEKAYHDNYPTIYHLRKALADNTEKADLRLIYLALAHIIKFRGHFLIEGALSANNTDVQQLVHALVDAYNIMFEEDQLDIEAIDVKAILTEKISKTRRLENLISNIPGQKKNGLFGNLIALSLGLTPNFKSHFNLPEDAKLQLAKDTYDEELNNLLTQIGDEYADLFLSAKNLSDAILLSDILTVNGDGTQAPLSASLIKRYEEHRQDLALLKQMFKEQLPDLYRDVFTDENKDGYAGYISGKTSQEAFYKYIKPILETLDGAEDFLTKINREDFLRKQRTFDNGSIPHQIHLGELQAILERQQAYYPFLKDNQEKIEKILTFRIPYYIGPLARGNSRFAWLTRTSDQKITPWNFDEMVDQEASAQAFIERMTNFDEYLPQEKVLPKHSLTYEYFTVYNELTKVKYVTEGMTKPEFLSAGQKEQIVELLFKKYRKVTVKQLKEDFFSKIECFDTVDISGVEDKFNASLGTYHDLLKIIKDKAFLDNSENENIIEDIILTLTLFEDKEMIANRLAVYEDLFDQNVLKQLKRRHYTGWGRLSKQLINGMRDKHTGKTILDFLKADGFINRNFMQLINDDNLSFKEEIKKAQEGGLKDSINDQIRDLAGSPAIKKGILQTINIVDEIVKIMGKAPQHIVVEMARDVQKTDIGVKQSRERMKRVQEVLKKLGSQLLKEHPVENFQLQNERLYLYYLQNGKDMYTGEELSISNLSHYDIDHIIPRSFIKDDSIDNKVLTRSEHNRGKTDNVPSIEVVKRMKPYWQKLLDTKVISQRKFDNLTKAERGGLQESDKANFIQRQLVETRQITKHVAQILDSRFNTERDEKDRPIRRVKVITLKSKFVSDFRQDFGFYKLREINDYHHAHDAYLNAVVGTALLKMYPKLASEFVYGDYQKYDLKRMVGKSGKASGHATAKYFFYSNLMNFFKSEVKLANGNIIKRSPIEVNEETGEIVWDKTKDFGTVRKVLSAPQVNIVKKTEIQTGGFSNETILSKGKSSKLIPRKNKWRDTTKYGGFNTPTVAYSVLVVAKVEKGKAKKLKPVKELVGITIMERTKFEANPIAFLESKGYHDIQEHLMITLPKYSLFELENGRRRLLASATELQKGNEMVLPQHLVTFLYRVSKRDKGTQSENMEYISNHKEKFIEIFHYIIRYAEKNVIKPKVIERLNDTFNQKFNDSDLTELSISFLNLFKFTSFGAPEKFTFLNSEIKQDDVRYRSTKECLNSTLIHQSVTGLYETRIDLSQFGGD

SEQ ID NO: 175 - protein, 1376 aa, Streptococcus pseudopneumoniae
MSNKPYSIGLDIGTNSVGWAVITDDYKVPSKKMKVLGNTDKHFIKKNLIGALLFDEGTTAEDRRLKRTARRRYTRRKNRLRYLQEIFSEEISKVDNSFFHRLDDSFLVPEDKRGSKYPIFATLTEEKEYYKQFPTIYHLRKQLADSKEKADLRLIYLTLAHMIKYRGHFLYEESFDIKNNDIQKIFNEFISIYDNTFEGSSLSGQNAQVEAIFTDKISKSTKRERVLKLFPDQKSTGLFSEFLKLIVGNQADFKKHFDLEEKAPLQFSKDTYDEDLENLLGQIGDDFADLFLVAKKLYDAILLSGILTVTDPSTKAPLSASMIERYENHQKDLAALKQFIKNNLPEKYDEVFSDQSKEGYAGYIDSKTTQEAFYKYIKNLLSKIDGADYLLDKIEREDFLRKQRTFDNGSIPHQIHLQEMNAILRRQGEHYPFLKENREKIEKILTFRIPYYVGPLARGNRDFAWLTRNSDQAIRPWNFEEIVDKASSAEAFINKMTNYDLYLPEEKVLPKHSLLYETFAVYNELTKVKFIAEGLRDYQFLDSGQKKKIINQLFKEKRKVTEKDLIHYLHNVDGYDGIELKGIEKQFNASLSTYHDLLKIIKDKRFMDEPKNQEILENIVHTLTIFEDREMIKQRLAQYASIFDEKVIKTLTRRHYTGWGKLSAKLINCIRDRKTGKTILDYLIDDGYNNRNFMQLINDDGLSFKEIIQESQVVGKPDDVKQIVQELPGSSAIKKGILQSIKLVDELVKVMGHDPESIVIEMARENQTTARGKKNSQQRYKRIEDSLKILASGLNSNILKEHPTDNIQLQNDRLFLYYLQNGKDMYTGNPLDINHLSSYDIDHIIPQAFIKDDSLDNRVLTSSKDNRGKSDNVPSLEVVQKRKAFWQQLLESKLISERKFNNLTKAERGGLNERDKVGFIKRQLVETRQITKHVAQILDSRFNTKVNEKNQKIRTVKIITLKSNLVSNFRKEFRLYKVREINDYHHAHDAYLNAVVAKAILKKYPKLEPEFVYGDYQKYDLKRYISRSRDPKEIEKATEKYFFYSNLLNFFKEEVHYADGTIVKRENIEYSKDTGEIAWNKEIDFATIRKILSLSQVNIVKKTEEQTVGQNGGLFDNNIVSKKKVVDASKLIPIKSGLSPEKYGGYARPTIAYSVLVIADIEKGKAKKLKRIKEMVGITIQDKKKFEANPTAYLEEYGYKNINPNLIIKLPKYSLFKFNDGQRRLLASSIELQKGNELILPYHFTTLLYHAQRINKISEPIHKQYVETHQSEFEELLTTIISLSKKYIQKPIVESLLQQAFEQADKDIYQLSESFISLLKLTSFGAPGAFRFLGVEISQSNVRYQSVSSCFNATLIHQSITGLYETRIDLSKLGED

SEQ ID NO: 176 - protein, 1376 aa, Streptococcus pseudopneumoniae
MSNKPYSIGLDIGTNSVGWVIITDDYKVPSKKMKVLGNTDKHFIKKNLIGALLFDEGTTAEDRRLKRTARRRYTRRKNRLRYLQEIFAEEMNKVDSSFFHRLDDSFLVPEDKRGSKYPIFATLAEEKEYHKNFPTIYHLRKQLADSKEKADLRLIYLALAHMIKYRGHFLYEEAFDIKNNDIQKIFNEFINIYDNTFEGSSLSGQNEQVEAIFSDKISKSAKRERVLKLFPDEKSTGLFSEFLKLIVGNQADFKKHFDLEEKAPLQFSKDTYDEDLENLLGQIGDGFADLFLVAKKLYDAILLSGILTVTDPSTKAPLSASMIERYQNHQNDLASLKQFIKNNLPEKYDEVFSDQSKDGYAGYVDGKTTQEAFYKYIKNLLSKFEGADYFLEKIEREDFLRKQRTFDNGSIPHQIHLQEMNAILRRQGEHYPFLKENKEKIEKILTFRIPYYVGPLARGNRDFAWLTRNSDQAIRPWNFEEIVDKASSAEDFINKMTNYDLYLPEEKVLPKHSLLYETFAVYNELTKVKFIAEGLRDYQFLDSGQKKQIVNQLFKEKRKVTEKDIIQYLHNVDGYDGIELKGIEKQFNASLSTYHDLLKIIKDKEFMDDSKNEEILENIVHTLTIFEDREMIKQRLAQYDSIFDEKVIKALTRRHYTGWGKLSAKLINGIRDKQTGKTILDYLIDDGYSNRNFMQLINDDGLSFKEIIQKAQVFGKTNDVKQVVQELPGSPAIKKGILQSIKIVEELVKVMGHEPESIVIEMARENQTTTRGKKNSQQRYKRIENSLKILASGLNSKILKEHPTDNNQLQNDRLFLYYLQNGKDMYTGEALDINQLSSCDIDHIIPQAFIKDDSLDNRVLTSSKENRGKSDNVPCLEVVDKMKVFWQQLLDFKLISYRKFNNLTKAERGGLDERDKVGFIRRQLVETRQITKHVAQILDSRFNTEVTEKDKKNRNVKIITLKSNLVSNFRKEFGLYKVREINDYHHAHDAYLNAVVAKAILKKYPKLEPEFVYGDYQKYDLKRYISRSKDPKDIEKATEKYFFYSNLLNFFKEEVHYADGTIVKRENIEYSKDTGEIAWNKEKDFATIKKILSLPQVNIVKKTEEQTVGQNGGLFDNNIVSKKKVVDASKLIPIKSGLSPEKYGGYARPTIAYSVLVIADIEKGKTKKLKRIKEMIGITVQDKKIFESNPIAYLEECGYKNINPNLIIKLPKYSLFEFNGGQRRLLASSIELQKGNELILPYHFTALLYHTQRINKISEPIHKQYVEAHQNEFKELLTTIISLSKKYIQKPNVESLLQQAFEQADKDIYQLSESFISLLKLTSFGAPGAFKFLGVEISQSSVRYKPNSQFLDATLIHQSITGLYETRIDLSKLGED

SEQ ID NO: 177 - protein, 1378 aa, Streptococcus pseudopneumoniae
MSNKPYSIGLDIGTNSVGWAVITDDYKVPSKKMTVLGNTDKHFIKKNLIGALLFDEGTTAEDRRLKRTARRRYTRRKNRLRYLQEIFSGEMSKVDSSFFHRLDDSFLVPEDKRGSKYPIFATLVEEKEYHKQFPTIYHLRKQLADSKEKADLRLIYLVLAHMIKYRGHFLYEEAFDIKNNDIQKIFNEFISIYDNTFEGSSLSGQNAQVETIFTDKISKSAKRERVLKLFPDEKSTGLFSEFLKLIVGNQADFKKHFDLGEKAPLQFSKDTYDEDLENLLGQIGDDFADLFLVAKKLYDAILLSGILTVTDPSTKAPLSASMIERYENHQKDLTTLKQFIKNNLPEKYDEVFSDQSKDGYAGYIDGKTTQEAFYKYIKNLLSKFEGTDYFLEKIEREDFLRKQRTFDNGSIPHQIHLQEMNAILRRQGEHYPFLKENKEKIEKILTFRIPYYVGPLARGNRDFAWLTRNSDQAIRPWNFEEIVDKASSAEDFINKMTNYDLYLPEEKVLPKHSLLYETFAVYNELTKVKFIAEGLRDYQFLDSGQKKQIVNQLFKEKRKVTEKDIIHYLHTVDGYDGIELKGIEKQFNASLSTYHDLLKIIKDKEFMDDSKNEAILENIVHTLTIFEDREMIKQRLAQYDSLFDKKVIKALTRRHYTGWGKLSAKLINGICDKQTGNTILDYLIDDGEINRNFMQLINDDGLSFKKIIQKSQVVGETDDVKQVVRELPGSPAIKKGILQSIKIVDELVKVMDHAPESIVIEMARENQTTARGKKNSQQRYKRIEDSLKILASGLDSNILKENPTDNNQLQNDRLFLYYLQNGKDMYTGEALDINQLSSYDIDHIIPQAFIKDDSLDNRVLTSSKDNRGKSDNVPSLEVVQKRKAFWQQLLDSKLISERKFNNLTKAERERDGLNELDKVGFIKRQLVETRQITKHVAQILDARFNKEVTEKDKKNRNVKIITLKSNLVSNFRKEFRLYKVREINDYHHAHDAYLNAVVAKAILKKYPKLEPEFVYGDYQKNDLKRYISRSKDPKDIEKATEKYFFYSNLLNFFKEEVHYADGTIVKRENIEYSKDTGEIAWNKEKDFATIKKVLSYPQVNIVKKTEEQTVGQNGGLFDNNIVSKEKVVDASKLIPIKSGLSPEKYGGYARPTIAYSVLVIADIEKGKTKKLKRIKEMVGITIQDKKKFEANPIAYLEECGYKNINPNLIIKLPKYSLFEFNGGQRRLLASSIELQKGNELILPYHFTALLYHAQRINKFSEPIHKQYVEAHQNEFKELLTIIISLSKKYIQKPNVESLLHQAFEQADNDIYQLSESFISLLKLTSFGAPGAFKFLGAEISQSSVRYKPNSQFLDTTLIHQSITGLYETRIDLSKLGED

SEQ ID NO: 178 - protein, 1374 aa, Streptococcus pseudoporcinus
MKKRYSYSIGLDIGTNSVGWAVINEDYKVPAKKMTVFGNTDRKTIKKNLLGTVLFDSGETAQARRLKRTNRRRYTRRRYRLCQLQNIFATEMVKVDDTFFQRLSESFFYYQDKAFDKHPIFGNSKEERAYHKTYPTIYHLRKDLADRDQKADLRLIYLALSHIIKFRGHFLIEGKLNSENTDVQKLFIALVTVYNLLFEEEPIAGETCDAKALLTAKTSKSKRLESLISEFPGQKKNGLFGNLLALALGLRPNFKSNFGLSEDAKLQITKDTYEEELDNLLAEIGDHYADLFLAAKNLSDAILLSDILTLSDENTRAPLSASMIKRYEEHQEDLALLKKLVKEQMPEKYWEIFSNAKKNGYAGYIEGKVSQEDFYRYIKPILSRLKGGDEFLAKIDRDDFLRKQRTFDNGSIPHQIHLKELHAILRRQEKYYPFLAEQKEKIEQLLCFRIPYYVGPLAKGGNSSFAWLKRRSDEPITPWNFKDVVDEEASAQAFIEGMTNYDTYLPEEKVLPKHSPLYEMFTVYNELTKVKYIAENMTKPLYLSAEQKEAIIDHLFKQTRKVTVKDLKEKYFSQIEGLENVDVTGVEGAFNASLGTYNDLLKIIKDKAFLDDEANAEILEEIVLILTLFQDEKLIEKRLAKYANLFEKSVLKKLRKRHYRGWGRLSRQLIDGMKDKASGKTILDFLKADDFANRNFIQLINDSSLDFEKLIDDAQKKAIKRESLTEAVANLAGSPAIKKGILQSLKVVDEIVKVMGHNPDNIVIEMSRENQTTAQGLKNARQRLKKIKEVHKKTGSRILEDNSERITNLTLQDNRLYLYLLQDGKDMYTGQDLDINNLSQYDIDHIIPQSFIKDNSIDNLVLTTQKANRGKSDNVPSIEVVRDMKDRVWRRQLANGAISRQKFDHLTKAERGGLADSDKARFLRRQLVETRQITKHVAQLLDSRFNSKSNQNKKLARNVKIITLKSKIVSDFRKDFGLYKLREVNNYHHAHDAYLNAVVGTALLKKYPKLEAEFVYGDYKHFDLVKLISKSDPSLGKATAKVFFYSNIMNFFKEELSLADGTLMKRPVIETNTETGEVVWDKVKDFKTIRKVLSYPQVNIVKKTEIQSGAFSKESVLSKGNSDKLIERKKGWDPKKYGGFDSPNTAYSIFVVAKVAKRKAQKLKTVKEIVGITIMEQAEYEKDNIAFLEKKGYQDIQEKLLIKLPKYSLFELENGRRRLLASANEFQKGNELALSGKYMKFLYLASRYDKLSSKIESEQQKKLFVEQHLHYFDEILDIVVKHATCYIKAENNLKKIISLYKKKEAYSINEQALNMLNLFIFTSLGAPSTFVFFDETIDRKRYTTSSDVLNGILIQQSITGLYETRIDLSRFGGD

SEQ ID NO: 179 - protein, 1326 aa, Streptococcus pseudoporcinus SPIN 20026
MLGTVLFDSGETAQARRLKRTNRRRYTRRRYRLCQLQNIFATEMVKVDDTFFQRLSESFFYYQDKAFDKHPIFGNSKEERAYHKTYPTIYHLRKDLADRDQKADLRLIYLALSHIIKFRGHFLIEGKLNSENTDVQKLFIALVTVYNLLFEEEPIAGETCDAKALLTAKTSKSKRLESLISEFPGQKKNGLFGNLLALALGLRPNFKSNFGLSEDAKLQITKDTYEEELDNLLAEIGDHYADLFLAAKNLSDAILLSDILTLSDENTRAPLSASMIKRYEEHQEDLALLKKLVKEQMPEKYWEIFSNAKKNGYAGYIEGKVSQEDFYRYIKPILSRLKGGDEFLAKIDRDDFLRKQRTFDNGSIPHQIHLKELHAILRRQEKYYPFLAEQKEKIEQLLCFRIPYYVGPLAKGGNSSFAWLKRRSDEPITPWNFKDVVDEEASAQAFIEGMTNYDTYLPEEKVLPKHSPLYEMFTVYNELTKVKYIAENMTKPLYLSAEQKEAIIDHLFKQTRKVTVKDLKEKYFSQIEGLENVDVTGVEGAFNASLGTYNDLLKIIKDKAFLDDEANAEILEEIVLILTLFQDEKLIEKRLAKYANLFEKSVLKKLRKRHYRGWGRLSRQLIDGMKDKASGKTILDFLKADDFANRNFIQLINDSSLDFEKLIDDAQKKAIKRESLTEAVANLAGSPAIKKGILQSLKVVDEIVKVMGHNPDNIVIEMSRENQTTAQGLKNARQRLKKIKEVHKKTGSRILEDNSERITNLTLQDNRLYLYLLQDGKDMYTGQDLDINNLSQYDIDHIIPQSFIKDNSIDNLVLTTQKANRGKSDNVPSIEVVRDMKDRVWRRQLANGAISRQKFDHLTKAERGGLADSDKARFLRRQLVETRQITKHVAQLLDSRFNSKSNQNKKLARNVKIITLKSKIVSDFRKDFGLYKLREVNNYHHAHDAYLNAVVGTALLKKYPKLEAEFVYGDYKHFDLVKLISKSDPSLGKATAKVFFYSNIMNFFKEELSLADGTLMKRPVIETNTETGEVVWDKVKDFKTIRKVLSYPQVNIVKKTEIQSGAFSKESVLSKGNSDKLIERKKGWDPKKYGGFDSPNTAYSIFVVAKVAKRKAQKLKTVKEIVGITIMEQAEYEKDNIAFLEKKGYQDIQEKLLIKLPKYSLFELENGRRRLLASANEFQKGNELALSGKYMKFLYLASRYDKLSSKIESEQQKKLFVEQHLHYFDEILDIVVKHATCYIKAENNLKKIISLYKKKEAYSINEQALNMLNLFIFTSLGAPSTFVFFDETIDRKRYTTSSDVLNGILIQQSITGLYETRIDLSRFGGD

SEQ ID NO: 180 - protein, 1370 aa, Streptococcus sanguinis
MKKPYSIGLDIGTNSVGWAVVTDDYKVPAKKMRVFGDTDRSHIKKNLLGTLLFDDGNTAESRRLKRTARRRYTRRRNRILYLQEIFTESMNEIDESFFHRLDDSFLVPEDKRGSKYPIFATLQEEKEYHKQFPTIYHLRKQLADSKEKSDVRLIYLALAHMIKYRGHFLYEETFDIKNNDIQKIFNEFINIYDNTFEGSSLSGQNAQVEAIFTDKISKSAKRERVLKLFPDEKSTGLFSEFLKLIVGNQADFKKHFDLEEKAPLQFSKDTYDEELENLLGQIGDDFADLFLIAKKLYDAILLSGILTVTDPSTKAPLSASMIERYENHQKDLAALKQFIKNNLPEKYVEVFSDQSKDGYAGYIDGKTTQEAFYKYIKNLLSKFEGADYFLDKIEREDFLRKQRTFDNGSIPHQIHLQEMNAILRRQGEHYPFLKENREKIEKILTFRIPYYVGPLARDNRDFSWLTRNSDEPIRPWNFEEVVDKARSAEDFIHRMTNYDLYLPEEKVLPKHSLLYETFAVYNELTKVKFIAEGLRDYQFLDSGQKKQIVNQLFKEKRKVTEKDIIHYLHNVDGYDGIELKGIEKQFNANLSTYHDLLKITKDKEFMDDPKNEEILENIVHTLTIFEDREMIKQRLAQYDTLFDEKVIKALTRRHYTGWGKLSAKLINGIRDKQSGKTILDYLIDDDKINRNFMQLINDDGLSFKEIIQKAQVVGKTDDVKQVVQELPGSPAIKKGILQSIKIVDELVKVMGYALESIVIEMARENQTTARGKKNSQQRYKRIEDALKNLAPGLDSNILKENPTDNIQLKNDRLFLYYLQNGKDMYTGKPLDINQLSSYDIDHIIPQAFIKDDSIDNRVLTSSKDNRGKSDNVPSLEVVQKRKAFWQQLLDSKLISERKFNNLTKAERGGLDERDKVGFIRRQLVETQQITKNVAQILDARFNTEVKEKNQKIRTVKIITLKSNLVSNFRKEFGLYKVREINNYHHAHDAYLNAVVAKAILKKYPKLEPEFVYGDYQKYDLKKYISRFKPSKEIEKATEKYFFYSNLLNFFKEEVLYADGTIRKRENIEYSKDTGEIAWDKEKDFATIKKVLSYPQVNIVKKREVQTGGFSKESILPKGNSDKLIPRKTKDILWDTTKYGGFDSPVIAYSILLIADIEKGKAKKLKTVKTLVGITIMEKAAFEENPITFLENKGYHNVRKENILCLPKYSLFELENGRRRLLASAKELQKGNEIVLPVCLTTLLYHSKNLHKLDEPEHLEYIQKHRNEFKDLLNLVSEFSQKYILAEANLEKIKDLYADNEQADIEILANSFINLLTFTALGAPAAFKFFGKDVDRKRYTTVSEILNATLIHQSITGLYETRIDLSKLGEE

SEQ ID NO: 181 - protein, 1377 aa, Streptococcus sanguinis
MKKPYSIGLDIGTNSVGWAVITDDYKVPSKKMKVLGNTDKHFIKKNLIGALLFDEGTTAEDRRLKRTSRRRYTRRKNRLRYLQEIFSEEISKLDSSFFHRLDDSFLVPEDKRGSKYPIFATLEEEKEYHKKFPTIYHLRKHLADSKEKTDLRLIYLALAHMIKYRGHFLYEESFDIKNNDIQKIFNEFISIYDNTFEGSSLSGQNAQVEAIFTDKISKSTKRERVLKLFSDEKSTGLFSEFLKLIVGNQADFKKHFDLEEKAPLQFSKDTYDEDLENLLGQIGDGFADLFLVAKKLYDAILLSGILTVTDPSTKAPLSASMIERYENHQEDLAALKQFIKNNLSEKYAEVFSDQSKDGYAGFIDGKTTQEAFYKYIKNLLSKLEGADYFLNKIEREDFLRKQRTFDNGSIPHQIHLQEMNAILRRQGEHYLFLKENREKIEKILAFRIPYYVGPLARGNRDFAWLTRNSDQAIRPWNFEEVVDKASSAEDFINKMTNYDLYLPEEKVLPKHSLLYETFAVYNELTKVKFIAEGLRDYQFLDSGQKKQIVNQLFKDKRKVTEKDIIHYLHNVDGYDGIELKGIEKQFNASLSTYHDLLKIIKDKEFMDNPKNGEILENIIHTLTIFEDREMIKQRLAQYDTLFDEKVIKALTRRHYTGWGKLSAKLINGIRDKQTGKTILEYLIDDGDCNRNFMQLINDDGLSFKEIIQKAQVVGKTDDVKQVVQEIPGSPAIKKGILQSIKIVDELVKVMGHNPESIVIEMARENQTTAKGKKNSQQRYKRIEDALKNLAPGLDSNILKENPTDNIQLQNDRLFLYYLQNGKDMYTGKAIDINQLSNYDIDHIIPQAFIKDDSLDNRVLTSSKDNRGKSDNVPSIEVVQKRKAFWQQLLDSKLISERKFNNLTKAKRGGLDERDKVGFIKRQLVETRQITKHVAQLLDTRFNTEVNEENQKIRTVKIITLKSNLVSNFRKEFGLYKVREINDYHHAHDAYLNAVVAKAILKKYPKLEPEFVYGDYQKYDLKRYILKSKASNTIDKATEKYFFYSNLLNFFKEKVRYADGTIKKRENIEYSNDTGEIAWNKEKDFATIKKVLSLPQVNIVKKTEEQTVGQNGGLFDNNIVSKKKVVDASKLIPIKSSLSPEKYGGYARPTIAYSVLVIADIEKGKGKAKKLKRIKEIVGITIQDKKKFESNPVTYLEECGYKNINSNLIIKLPKYSLFEFNDGQRRLLASSIELQKGNELILPYHLTALLYHAQRINKISEPIHKQYVEAHQNEFKELLTTIISLSKKYIQKPNVELLLQQAFDQADKDIYQLSESFISLLKLTSFGAPGAFKFLGVEISQSSVRYKPNSQFLDTTLIHQSITGLYETRIDLSKLGED

SEQ ID NO: 182 - protein, 1371 aa, Streptococcus sp. F0441
MENKNYSIGLDIGTNSVGWSVITDDYKVPSKKMKVLGNTDKHFIKKNLIGALLFDEGTTAEARRLKRTARRRYTRRKNRLRYLQEIFSEEIGKVDSSFFHRLDDSFLIPEDKRGSKYPIFATLAEEKKYHKQFPTIYHLRKQLADSKEKTDLRLIYLALAHMIKYRGHFLYEEAFDIKNNDIQKIFNEFISIYNNTFEGNSLSGQNVQVEAIFTDKISKSAKRERVLKLFPDEKSTGLFSEFLKLIVGNQADFKKHFDLEEKAPLQFSRDTYDEDLENLLGQIGDDFADLFLVAKKLYDAILLSGILTVTNPSTKAPLSASMIERYENHQKDLASLKQFIKNNLPEKYDEVFSDQSEDGYAGYIDGKTTQETFYKYIKNLLSKFEGADYFLDKIEREDFLRKQRTFDNGSIPHQIHLQEMNAILRRQGEHYPFLKENKEKIEKILTFRIPYYVGPLARGNRDFAWLTRNSDQAIRPWNFEEIVDKASSAEDFINKMTNYDLYLPEEKVLPKHSLLYETFAVYNELTKVKFIAEGLRDYQFLDSGQKKQIVTQLFKEKRKVTEKDIIQFLHNVDGYDGIELKGIEKQFNASLSTYHDLLKIIKDKAFMDDAKNEAILENIVHTLTIFEDREMIKQRLAQYDSLFDEKVIKALTRRHYTGWGKLSAKLINGISDKQTGNTILDYLIDDGEINRNFMQLINDDGLSFKEIIQKAQVVGKTNDVKQVVQELPGSPAIKKGILQSIKIVDELVKVMGHAPESIVIEMARENQTTARGKKNSQQRYKRIEDSLKILASGLNSKILKEHPTDNIQLQNDRLFLYYLQNGKDMYTGEALDINQLSSCDIDHIIPQAFIKDDSLDNRVLTSSKDNRGKSDNVPSLEVVDKMKVFWQQLLDSKLISYRKFNNLTKAERGGLNELDKVGFIKRQLVETRQITKHVAQILDARFNKEVTEKDKKNRTVKIITLKSNLVSNFRKEFELYKVREINDYHHAHDAYLNAVVAKAILKKYPKLEPEFVYGDYQKYDLKRYISRSKDPKEIEKATEKYFFYSNLLNFFKEEVHYADGTIVKRENIEYSKDTGEIAWNKEKDFATIKKVLSLPQVNIVKKREVQTGGFSKESILPKGNSDKLIPRKTKDILWDTTKYGGFDSPVIAYSILLIADIEKGKAKKLKTVKTLVGITIMEKDAFEKNPIAFLENKGYHNVCKENILCLPKYSLFELENGRRRLLASAKELQKCNEIVLPVYLTTLLYHSKNVHKLDEPGHLEYIQKHRNEFKDLLNLVSEFSQKYVLADANLEKIKNLYADNEQADIEILANSFINLLTFTALGAPAAFKFFGKDVDRKRYTTVSEILNATLIHQSITGLYETRIDLSKLGED

SEQ ID NO: 183 - protein, 1361 aa, Streptococcus sp. FF10
MKKPYSIGLDIGTNSVGWSVVTDDYKVPAKKMKVLGNTDKEYIKKNLIGALLFDSGETAEATRMKRTARRRYTRRRNRILYLQDIFSPELNQVDESFLHRLDDSFLVAEDKRGERHVIFGNIADEVKYHKEFPTIYHLRKHLADSSEKADLRLVYLALAHIIKYRGHFLIDEPIDIRNMNSQNLFKEFLLAFDGIQVDCYLASKHTDISGIITAKISKSRKVEAVLEQFPDQKKNSFFGNMVSLVFGLMPNFKSNFELDEDAKLQFSRDSYDEDLENLLGIIGDEYADVFVAAKKVYDSILLSGILTTNNHSTKAPLSASMIDRYDEHNSDKKLLRDFIRTNIGKEVFKEVFYDTSKNGYAGYIDGKTNQEDFYKYLKNLLQKVDGGDYFIEKIEREDFLRKQRTFDNGSIPHQVHLDEMKAILRRQGEFYPFLKENAEKIQQILTFKIPYYVGPLARGNSRFAWASYNSNEKMTPWNFDNVIDKTSSAQAFIERMTNNDLYLPDQKVLPKHSLLYQKFAVYNELTKIKYVTETGEARLFDVFLKKEIFDGLFKKERKVTKKKILNFLDKNFDEFRITDIQGLDNETGNFNASYGTYHDLLKIIGDKEFMDSSDNVDVLEDIVLSLTLFEDREMIKQRLLKYEDIFSKKVIANLTRRHYTGWGRLSAKLINGIKDKHSRKTILDYLIDDGHSNRNFMQLINDDNLSFKDEIANSQVIGDGDDLHQVVQELAGSPAIKKGILQSLKIVDELVKVMGYNPEQIVVEMARENQTTARGRNNSQQRLGSLTKAIQDFGSDILKRYPVENNQLQNDQLYLYYLQNGKDMYTGDTLDIHNLSQYDIDHIIPQSFIKDNSLDNRVLTNSKSNRGKSDNVPSNEVVKRMKGFWLKQLDAKLISQRKFDNLTKAERGGLSAEDKAGFIKRQLVETRQITKHVARILDERFNRDFDKNDKRIRNVKIVTLKSNLVSNFRKEFGFYKVREINNFHHAHDAYLNAVVAKALLIRYPKLEPEFVYGEYPKYNSYRERKSATEKMFFYSNIMNMFKTTIKLADGRVVEKPVIEANEETGEIAWDKTKHFANVKKVLSYPQVSIVKKVEEQTGGFSKESILPKGGSDKLIARKTKNNYLSTQKYGGFDSPTVAYSIMFVADIEKGKSKRLKTVKEMIGITIMERSRFESNSVTFLEEKGYRNIRENTIIKFPKYSLFELENGRRRLLASAIELQKGNEMFLPQQFVNLLYHAQHANKEDSVIYLEKHRHELSELFHHIIGVSEKTILKPKVEMTLNEAFEKHFEFDEVSELAQSFISLLKFTAFGAPGGFKFLDADIKQSNLRYQTVTEVLSSTLIHQSVTGLYETRIDLSKLGGE

SEQ ID NO: 184 - protein, 1375 aa, Streptococcus sp. M334
MSNKSYSIGLDIGTNSVGWAVITDDYKVPSKKMKVLGNTDKHFIKKNLIGALLFDEGTTAEDRRLKRTARRRYTRRKNRLRYLQEIFSQEISKVDSSFFHRLDDFFLVPEDKRGSKYPIFATLVEEKEYHKKFPTIYHLRKHLADSKEKTDLRLIYLALAHMIKYRGHFLYEESFDIKNNDIQKIFSEFISIYDNTFEGKSLSGQNAQVEAIFTDKISKSTKRERVLKLFPDEKSTGLFSEFLKLIVGNQADFKKHFDLEEKAPLQFSKDTYDEDLENLLGQIGDDFADLFLVAKKLYDAILLSGILTVKDLSTKAPLSASMIERYENHQKDLAALKQFIQNNLQEKYDEVFSDQSKDGYAGYIDGKTTQEAFYKYIKNLLSKFEGADYFLDKIEREDFLKKQRTFDNGSIPHQIHLQEMNAIIRRQGEHYPFLQENKEKIEKILTFRIPYYVGPLARGNGDFAWLTRNSDQAIRPWNFEEIVDQASSAEDFINKMTNYDLYLPEEKVLPKHSLLYETFAVYNELTKVKFIAEGLTRYQFLDKKQKKDIFDTFFKAENKRKVTEKDIIHYLHNVDGYDGIELKGIEKQFNASLSTYHDLLKIIKDKAFMDDSKNEEILENIIHTLTIFEDREMIKQRLAQYDSLFDEKVIKALTRRHYTGWGKLSAKLINGIRDKKSGKTILDYLIDDGEINRNFMQLIHDDGLSFKEIIQKAQVFGKTNDVKQVVQELPGSPAIKKGILQSIKIVDELVKVMGHAPESIVIEMARENQTTARGKKNSQQRYKRIEDSLKNLASGLDSNILKENPTDNIQLQNDRLFLYYLQNGRDMYTGKPLEINQLSNYDIDHIIPQAFIKDDSLDNRVLTSSKDNRGKSDNVPSLEVVEKMKAFWQQLLDSKLISERKFNNLTKAERERGGLNELDKVGFIKRQLVETRQITKHVAQFLDARFNKEVTEKDKKNRNVKIITLKSNLVSNFRKEFGLYKVREINDYHHAHDAYLNAVLAKAILKKYPKLEPEFVYGDYQKYDLQRYISKSREPKEVEKATQKYFFYSNLLNFFKEEVHYADGTIVKRENIEYSKDTGEIAWNKEKDFATVKKVLSLPQVNIVKKTEVQTGGFSKESILPKGNSDKLIPRKTKEILWDTTKYGGFDSPVIAYSILLIADIEKGKAKKLKTVKTLVGITIMEKATFEKNPITFLENKGYHNVRKENILCLPKYSLFELESGRRRMLASAKELQKGNEIVLPVYLTTLLYHSKNVHKLDEPEHLEYIQKHRYEFKDLLNLVSEFSQKYVLADANLEKIKNLYADNEQADIEILANSFINLLTFTALGAPAAFKFLGKDVDRKRYTTVSEILNATLIHQSITGLYETRIDLSKLGED

SEQ ID NO: 185 - protein, 1371 aa, Streptococcus sp. taxon 056
MNNNNYSIGLDIGTNSVGWAVITDDYKVPSKKMRVLGNTDKRFIKKNLIGALLFDEGTTAEDRRLKRTARRRYTRRKNRLRYLQEIFAEEMSKVDSSFFHRLDDSFLVPEDKSGSKYPIFATLAEEKEYHKKFPTIYHLRKHLADSKEKADLRLIYLALAHITKYRGHFLYEEAFDIKNNDIQKIFNEFINIYDNTFEGSSLSGQNAQVEAIFTGKISKSVKREHVLKLFPDEKSTGLFSEFLKLIVGNQADFKKHFDLEEKASLQFSKDTYDEDLENLLGQIGDDFADLFLVAKKLYDAILLSGILTVTDPSTKAPLSASMIERYENHQEDLAALKQFIKNNLPEKYAEVFSDQSKDGYAGYIDGKTTQEAFYKYIKNLLSKFEGADYFLDKIEREDFLRKQRTFDNGSIPHQIHLQEMNAILRRQGEHYPLLKENKEKIEKILTFRIPYYVGPLARGNRDFAWLTRNSDQAIRPWNFEEIVDKASSAESFINKMTNYDLYLPEEKVLPKHSLLYETFAVYNELTKVKFIAEGLRDYQFFDSGQKKQIVNQLFKEKRKVTEKDIIHYLHNVDGYDGIELKGIEKQFNASLSTYHDLLKIIKDKEFMDNHKNQEILENIVHTLTIFEDREMIKQRLAQYDSIFDEKVIKALTRRHYTGWGKLSAKLINGICDKKTGKTILDYLIDDGYNNRNFMQLINDDGLSFKEIIQKAQVVGKTDDLTQVVRELSGSPAIKKGILQSIKIVDELVKIMGYAPESIVIEMARENQTTAKGKKNSQQRYKRIEDALKNLAPGLDSTISKENPTDNIQLQNDRLFLYYLQNGKDMYTGEALDINQLSSYDIDHIIPQAFIKDDSLDNRVLTSSKDNRGKSDNVPSLEVVKKRKAFWQQLLDSKLISERKFNNLTKAERGGLDERDKVGFIKRQLVETRQITKHVARILDARFNTEVSEKNQKIRSVKIITLKSNLVSNFRKEFKLYKVREINDYHHAHDAYLNAVVAKAILKKYPKLEPEFVYGDYQKYDLKRYISKSKDPKEVEKATEKYFFYSNLLNFFKEEVHYADGTIVKRENIEYSKDTGEIAWNKEKDFVTIKKVLSYPQVNIVKKREVQTGGFSKESILPKGNSDKLIPRKTKDILWDTTKYGGFDSPVIAYSILLIADIEKGKAKKLKTVKTLVGITIMEKAAFEKNPITFLENKGYHNVRKENILCLPKYSLFELENGRRRLLASAKELQKGNEIVLPVYLTTLLYHSKNVHKLDEPEHLEYIQKHRYEFKDLLNLVSEFSQKYVLAEANLEKIKSLYVDNEQADIEILANSFINLLTFTALGAPAAFKFFGKDVDRKRYTTVSEILNATLIHQSITGLYETRIDLSKLGED

SEQ ID NO: 186 - protein, 1364 aa, Streptococcus suis
MKKKYAIGIDIGTNSVGWSVVTDDYKVPSKKMKVFGNTEKRYIKKNLLGTLLFDEGNTAENRRLKRTARRRYTRRRNRILYLQEIFAEEINKIDDSFFQRLDDSFLIVEDKQGSKHPIFGTLQEEKKYHKQFPTIYHLRKQLADSSQKADIRLIYLALAHIIKYRGHFLFEGDLKSENKDVQHLFNDFVEMFDKTVEGSYLSENLPNVADVLVEKVSKSRRLENILHYFPNEKKNGLFGNFLALALGLQPNFKTNFELAEDAKIQFSKETYEEDLEELLGKIGDDYADLFIATKSLYDGILLAGILSTTDSTTKAPLSSSMVNRYEEHKKDLALLKNFIHQNLSDSYKEVFNDKLKDGYAGYIEGKTTQENFYRFIKKAIEKIEGSDYFIDKIDREDFLRKQRTFDNGSIPHQIHLQEMHAIIRRQAEFYPFLVENQDKIEKILTFRIPYYVGPLARGKSEFAWLNRKSDEKIRPWNFDEMVDKETSAENFITRMTNYDQYLPDQKVLPKHSLLYEKFAVYNELTKVKFIAEGMRDYQFLDSGQKKDIVKTLFKTKRKVTAKDIKAYLENSNGYAGVELKGLEEQFNASLPTYHDLLKILRDKAFIDAEENQEILEDIVLTLTLFEDREMIRKRLEKYKDILTEEQRKKLERRHYTGWGRLSAKLINGILDKVTRKTILGYLIDDGTSNRNFMQLINDDTLSFVDEIRLAQGSGEAEDYRAEVQNLAGSPAIKKGILQSLKIVDELIEVMGYDPEHIVVEMARENQFTNQGRRNSQQRYKKIENAIKNLDSNLNSKILKEYPTNNQALQNDRLFLYYLQNGKDMYTDEELDIDQLSQYDIDHIIPQAFIKDDSLDNKVLTKSAKNRGKSDDVPSLEIVHKKKNFWKQLLDSQLISQRKFDNLTKAERGGLTNEDKARFIQRQLVETRQITKHVARILDTRFNTKLDEAGNRIRDPKVNIITLKSNLVSQFRKDYQLYKVREINNYHHAHDAYLNAVVATALLKKYPQLAPEFVYGDYPKYNSYKSRKSATEKVLFYSNIMNFFRRVLVYSKTGEVRIRPVIEVNKETGEIVWDKKSDFRTVRKVLSYPQVNVVKKVEMQTGGFSKESILQHGDSDKLIPRKTEKFYLDTKKYGGFDSPTIAYSVLLIADIEKGKAKKLKRVKELIGITIMERMAFEKNPIEFLEHKGYKNILEKNIIKLPKYSLFELENGRRRLLASAKELQKGNEMILPPHLVTLLYHSSNIHKITEPIHLNYVNKNKHEFKELLRHISDFSTRYILAQDRLSKIEELYDKNDGDDISDLTSSFVNLLTFTAIGAPAAFKFLGSVIDRKRYTSIAEILEATLIHQSVTGLYETRIDLSKLGGD

SEQ ID NO: 187 - protein, 1366 aa, Streptococcus suis
MKKKYAIGIDIGTNSVGWSVVTDDYKVPSKKMKVFGNTEKRYIKKNLLGTLLFDEGNTAENRRLKRTARRRYTRRRNRILYLQEIFAEEINKIDDSFFQRLDDSFLIVEDKQGSKHPIFGTLQEEKEYHKQFPTIYHLRKQLADSSQKADIRLIYLALAHIIKYRGHFLFEGDLKSENKDVQHLFNDFVEMFDKTVEGSYLSENLPNVADVLVEKVSKSRRLENILHYFPNEKKNGLFGNFLTLALGLQPNFKTNFELAEDAKIQFSKETYEEDLEELLGKIGDDYADLFIATKSLYDGILLAGILSTTDSTTKAPLSSSMVNRYEEHQKDLALLKNFIHQNLSDSYKEVFNDKLKDGYAGYIEGKTTQENFYRFIKKAIEKIEGSNYFIDKIDREDFLRKQRTFDNGSIPHQIHLQEMHAIIRRQAEFYPFLVENQDKIEKILTFRIPYYVGPLARGKSEFAWLNRKSDEKIRPWNFDEMVDKETSAENFITRMTNYDQYLPDQKVLPKHSLLYEKFAVYNELTKVRYVTEQGKSFFFDANMKQEIFDGVFKVYRKVTKEKLMDFLGKEFDEFRIVDLLGLDKDNKSFNASLGTYHDLKKIVSKDLLDNPENEDILENVVLTLTLFEDREMIRKRLEKYKDVLTEEQRKKLERRHYTGWGRLSAKLINGIRDKVTRKTILDYLIDDGTSNRNFMQLINDDTLSFVDEIRLAQGSGEAEDYRAEVQNLAGSPAIKKGILQSLKIVDELIEVMGYDPEHIVVEMARENQFTNQGRRNSQQRYKKIENAIKNLDSNLNSKILKEYPTNNQALQNDRLFLYYLQNGKDMYTDEELDIDQLSQYDIDHIIPQAFIKDDSLDNKVLTKSAKNRGKSDDVPSLEIVHKKKNFWKQLLDSQLISQRKFDNLTKAERGGLTNEDKARFIQRQLVETRQITKHVARILDTRFNTKLDEAGNRIRDPKVNIITLKSNLVSQFRKDYQLYKVREINNYHHAHDAYLNAVVATALLKKYPQLAPEFVYGDYPKYNSYKSRKSATEKVLFYSNIMNFFRRVLVYSKTGEVRIRPVIEVNKETGEIVWDKKSDFRTVRKVLSYPQVNVVKKVEMQTGGFSKESILQHGDSDKLIPRKTEKFYLDTKKYGGFDSPTIAYSVLLIADIEKGKAKKLKRVKELIGITIMERMAFEKNPIEFLEHKGYKNILEKNIIKLPKYSLFELENGRRRLLASAKELQKGNEMILPPHLVTLLYHSSNIHKITEPIHLNYVNKNKHEFKELLRHISDFSTRYILAQDRLSKIEELYDKNDGDDISDLTSSFVNLLTFTAIGAPAAFKFLGSVIDRKRYTSIAEILEATLIHQSVTGLYETRIDLSKLGGD

SEQ ID NO: 188 - protein, 1366 aa, Streptococcus suis
MKKKYAIGIDIGTNSVGWSVVTDDYKVPSKKMKVFGNTEKRYIKKNLLGTLLFDEGNTAENRRLKRTARRRYTRRRNRILYLQEIFAEEINKIDDSFFQRLDDSFLIVEDKQGSKHPIFGTLQEEKEYHKQFPTIYHLRKQLADSSQKADIRLIYLALAHIIKYRGHFLFEGDLKSENKDVQHLFNDFVEMFDKTVEGSYLSENLPNVADVLVEKVSKSRRLENILHYFPNEKKNGLFGNFLALALGLQPNFKTNFELAEDAKIQFSKETYEEDLEELLGKIGDDYADLFIATKSLYDGILLAGILSTTDSTTKAPLSSSMVNRYEEHQKDLALLKNFIHQNLSDSYKEVFNDKLKDGYAGYIEGKTTQENFYRFIKKAIEKIEGSNYFIDKIDREDFLRKQRTFDNGSIPHQIHLQEMHAIIRRQAEFYPFLVENQDKIEKILTFRIPYYVGPLARGKSEFAWLNRKSDEKIRPWNFDEMVDKETSAENFITRMTNYDQYLPDQKVLPKHSLLYEKFAVYNELTKVRYVTEQGKSFFFDANMKQEIFDGVFKVYRKVTKEKLMDFLGKEFDEFRIVDLLGLDKDNKSFNASLGTYHDLKKIVSKDLLDNPENEDILENVVLTLTLFEDREMIRKRLEKYKDVLTEEQRKKLERRHYTGWGRLSAKLINGIRDKVTRKTILDYLIDDGTSNRNFMQLINDDTLSFVDEIRLAQGSGEAEDYRAEVQNLAGSPAIKKGILQSLKIVDELIEVMGYDPEHIVVEMARENQFTNQGRRNSQQRYKKIENAIKNLDSNLNSKILKEYPTNNQALQNDRLFLYYLQNGKDMYTDEELDIDQLSQYDIDHIIPQAFIKDDSLDNKVLTKSAKNRGKSDDVPSLEIVHKKKNFWKQLLDSQLISQRKFDNLTKAERGGLTNEDKARFIQRQLVETRQITKHVARILDTRFNTKLDEAGNRIRDPKVNIITLKSNLVSQFRKDYQLYKVREINNYHHAHDAYLNAVVATALLKKYPQLAPEFVYGDYPKYNSYKSRKSATEKVLFYSNIMNFFRRVLVYSKTGEVRIRPVIEVNKETGEIVWDKKSDFRTVRKVLSYPQVNVVKKVEMQTGGFSKESILQHGDSDKLIPRKTEKFYLDTKKYGGFDSPTIAYSVLLIADIEKGKAKKLKRVKELIGITIMERMAFEKNPIEFLEHKGYKNILEKNIIKLPKYSLFELENGRRRLLASAKELQKGNEMILPPHLVTLLYHSSNIHKITEPIHLNYVNKNKHEFKELLRHISDFSTRYILAQDRLSKIEELYDKNDGDDISDLTSSFVNLLTFTAIGAPAAFKFLGSVIDRKRYTSIAEILEATLIHQSVTGLYETRIDLSKLGGD

SEQ ID NO: 189 - protein, 1364 aa, Streptococcus suis
MKKKYAIGIDIGTNSVGWSVVTDDYKVPSKKMKVFGNTEKRYIKKNLLGTLLFDEGNTAENRRLKRTARRRYTRRRNRILYLQEIFAEEINKIDDSFFQRLDDSFLIVEDKQGSKHPIFGTLQEEKKYHKQFPTIYHLRKQLADSSQKADIRLIYLALAHIIKYRGHFLFEGDLKSENKDVQHLFNDFVEMFDKTVEGSYLSENLPNVADVLVEKVSKSRRLENILHYFPNEKKNGLFGNFLALALGLQPNFKTNFELAEDAKIQFSKETYEEDLEELLGKIGDDYADLFIATKSLYDGILLAGILSTTDSTTKAPLSSSMVNRYEEHKKDLALLKNFIHQNLSDSYKEVFNDKLKDGYAGYIEGKTTQENFYRFIKKAIEKIEGSDYFIDKIDREDFLRKQRTFDNGSIPHQIHLQEMHAIIRRQAEFYPFLVENQDKIEKILTFRIPYYVGPLARGKSEFAWLNRKSDEKIRPWNFDEMVDKETSAENFITRMTNYDQYLPDQKVLPKHSLLYEKFAVYNELTKVKFIAEGMRDYQFLDSGQKKDIVKTLFKTKRKVTAKDIKAYLENSNGYAGVELKGLEEQFNASLPTYHDLLKILRDKAFIDAEENQEILEDIVLTLTLFEDREMIRKRLEKYKDILTEEQRKKLERRHYTGWGRLSAKLINGILDKVTRKTILGYLIDDGTSNRNFMQLINDDTLSFVDEIRLAQGSGEAEDYRAEVQNLAGSPAIKKGILQSLKIVDELIEVMGYDPEHIVVEMARENQFTNQGRRNSQQRYKKIENAIKNLDSNLNSKILKEYPTNNQALQNDRLFLYYLQNGKDMYTDEELDIDQLSQYDIDHIIPQAFIKDDSLDNKVLTKSAKNRGKSDDVPSLEIVHKKKNFWKQLLDSQLISQRKFDNLTKAERGGLTNEDKARFIQRQLVETRQITKHVARILDTRFNTKLDEAGNRIRDPKVNIITLKSNLVSQFRKDYQLYKVREINNYHHAHDAYLNAVVATALLKKYPQLAPEFVYGDYPKYNSYKSRKSATEKVLFYSNIMNFFRRVLVYSKTGEVRIRPVIEVNKETGEIVWDKKSDFKTVRKVLSYPQVNVVKKVEMQTGGFSKESILQHGDSDKLIPRKTEKFYLDTKKYGGFDSPTIAYSVLLIADIEKGKAKKLKRVKELIGITIMERMAFEKNPIEFLEHKGYKNILEKNIIKLPKYSLFELENGRRRLLASAKELQKGNEMILPPHLVTLLYHSSNIHKITEPIHLNYVNKNKHEFKELLRHISDFSTRYILAQDRLSKIEELYDKNDGDDISDLTSSFVNLLTFTAIGAPAAFKFLGSVIDRKRYTSIAEILEATLIHQSVTGLYETRIDLSKLGGD

SEQ ID NO: 190 - protein, 1386 aa, Streptococcus suis
MDQKYSIGLDIGTNSVGWAVVTDDYKVPAKKMKVLGNTDKQSIKKNLLGALLFDSGETAEATRLKRTARRRYTRRRNRLRYLQEIFAEEMNKVDENFFQRLDDSFLVDEDKRGERHPIFGNIAAEVKYHDDFPTIYHLRKHLADISQKADLRLVYLALAHMIKFRGHFLIEGQLKAENTNVQALFKDFVEVYDKTVEESHLSEMTVDALSILTEKVSKSRRLENLIAHYPAEKKNTLFGNLIALSLGLQPNFKTNFQLSEDAKLQFSKDTYEEDLEGLLGEIGDEYADLFASAKNLYDAILLSGILTVDDNSTKAPLSASMVKRYEEHQKDLKKLKDFIKVNAPDQYNAIFKDKNKKGYAGYIENGVKQDEFYKYLKGILLQINGSGDFLDKIDREDFLRKQRTFDNGSIPHQIHLQEMHAILRRQEEHYPFLKENQDKIEKILTFRIPYYVGPLARKGSRFAWAEYKADEKITPWNFDDILDKEKSAEKFITRMTLNDLYLPEEKVLPKHSLLYETFTVYNELTKVKYVNEQGEAKFFDANMKQEIFDHVFKENRKVTKDKLLNYLGKEFDEFRIVDLTGLDKENKVFNSSLGTYHDLRKILDKSFLDNKENEQIIEDIIQTLTLFEDREMIRQRLQKYSDIFTKAQLKKLERCHYTGWGRLSYKLINGIRNKENKKTILDYLIDDGYANRNFMQLINDDALSFKEEIAKAQVIGETDDLNQVVSDIAGSPAIKKGILQSLKIVDELVKVMGYNPANIVIEMARENQTTDKGRRNSQQRLKLLQDSLKNLDNPVNIKNVENQQLQNDRLFLYYIQNGKDMYTGETLDINNLSQYDIDHIIPQAFIKDDSFDNRVLTSSSENRGKSDNVPSIEVVRARKADWMRLRKAGLISQRKFDNLTKAERGGLTENDKAGFIKRQLVETRQITKHVAQVLDARFNAKHDENKKVIRDVKIITLKSNLVSQFRKDFKFYKVREINDYHHAHDAYLNAVIGTALLKKYPKLASEFVYGEFKKYDVRKFIAKSDKEIGKATAKYFFYSNLMNFFKKEVKFADGTVVERPDIETSEDGEIAWNKQTDFKIVRKVLSYPQVNIVKKTEVQTHGLDRGKPRGLFNANPSPKPKPDSSENLVGVKRNLDPKKYGGYAGISNSYAVLVKAIIEKGVKKKETMVLEFQGISILDRITFEKDKRAFLLGKGYKDIKKIIELPKYSLFELKDGSRRMLASILSTNNKRGEIHKGNELFVPQKFTTLLYHAKRINNPINKDHIEYVKKHRDDFKELLNYVLEFNEKYVGATKNGERLKEAVADFDSKSNEEICTSFLGAVNSKNAGLFELTSLGSASDFEFLGVKIPRYRDYTPSSLLKDSTLIHQSITGLYETRIDLSKLGED

SEQ ID NO: 191 - protein, 1300 aa, Brochothrix thermosphacta
MWGVSLFEAGKTAAERRGYRSTRRRLNHRKFRLRLLEDMFEKEILSKDPSFFIRLKEAFLSPKDEQKQFKGNILFNDKDYTDADYYEQYKTIYHLRYDLISQHRQFDIREVYLAIHHLIKYRGHFIYEDQTFTTDGNQLQHHIKAIITMINSTLNRIIIPETIDINVFEKILLDRMMNRSSKVKFLIELTGEDKQDKPLLKELFNLIVGLKAKPASIFEQENLATIVETMNMSTEQVQLDLLTLADVLADEEYDLLLTAQKIYSAIILDESMDGYEYFAEAKKESYRKHQEELVLVKKMLKSNAITNDERAKFEYFYTDYIGAKSSNYEESKNIKKGLSAAYGKYSKEERLFKHIELLLAKENVLTTVEHALLEKNITFASLLPLQRSSRNAVIPYQVHEKELVAILENQATYYPFLLEQKDNIHKLLTFRIPYYVGPLADQKDSEFAWMVRKQAGKITPFNFEEMVDIDASSEAFIKRMTNKCTYLIHEDVIPKHSFSYAKFEVLNELNKIRLDGKPIDIPLKKRIFEGLFLEKTKVTQTSLKKWLAEHEHMTVSVVQGTQKETEFATSLQAFHRFVKIFDRETVSNPANEEMFEKIIYWSTVFEDKKIMRRKLSEYPQLTEQQQVQLAQVRFRGWGRLSQRLINRIKTPVSGDEDHKLSINEILWQTNENFMQIIRNKDYLFKKIIEEQFENETALLNKQRIDELAASPANKKGIWQAIKIVKELEKVLQQPAENIFIEFARSDEESKRSTPRDKFIEKAYAQLKKETDTFNLEHLKELKQRSKQLSSQRLFLYFIQNGKCMYSGEHLDIERLDSYEVDHILPQSYIKDNSIENLALVKKVENQRKKDSLLLNSSIINQNYSRWEQLKNAGLIGEKKFRNLTRTKITDRDKEGFIARQLVETRQITKHVTQLLQQEYKDTTKVFAIKATLVSGLRRKFEFIKNRNVNDYHHAQDAFLVAFLGTNITSNYPKIEMEYLFKGYQHYLNEVGKSAAKPKFTFIVENLSKQQYNSTTGEVKWNPEVDIAKLKRILNFKQCNIVRKVEEQSGALFKETIYPVEESSSKTIPLKKHLDTAIYGGYTAVNYASYALIQFKKGRKLKREIIGIPLAVQTRIDNSETSLQAYIAEQIKSEVEILNGRILKYQLISNNGNRLYIAGPSERHNARQLIVSDEAAKVIWLISTKQADEAMFLKYYRLEHLEAVFEELIRKQAADYQIFEKLIKKIEVNKVYFYSCTYNEKVKVIEELLKITQANATNGDLKLLKMSNREGRLGSVSVALDFKIINQSVTGLYQSIEDYNN

SEQ ID NO: 192 - protein, 1329 aa, Catenibacterium mitsuokai
IVDYCIGLDLGTGSVGWAVVDMNHRLMKRNGKHLWGSRLFSNAETAANRRASRSIRRRYNKRRERIRLLRAILQDMVLEKDPTFFIRLEHTSFLDEEDKAKYLGTDYKDNYNLFIDEDFNDYTYYHKYPTIYHLRKALCESTEKADPRLIYLALHHIVKYRGNFLYEGQKFNMDASNIEDKLSDIFTQFTSFNNIPYEDDEKKNLEILEILKKPLSKKAKVDEVMTLIAPEKDYKSAFKELVTGIAGNKMNVTKMILCEPIKQGDSEIKLKFSDSNYDDQFSEVEKDLGEYVEFVDALHNVYSWVELQTIMGATHTDNASISEAMVSRYNKHHDDLKLLKDCIKNNVPNKYFDMFRNDSEKSKGYYNYINRPSKAPVDEFYKYVKKCIEKVDTPEAKQILNDIELENFLLKQNSRTNGSVPYQMQLDEMIKIIDNQAEYYPILKEKREQLLSILTFRIPYYFGPLNETSEHAWIKRLEGKENQRILPWNYQDIVDVDATAEGFIKRMRSYCTYFPDEEVLPKNSLIVSKYEVYNELNKIRVDDKLLEVDVKNDIYNELFMKNKTVTEKKLKNWLVNNQCCSKDAEIKGFQKENQFSTSLTPWIDFTNIFGKIDQSNFDLIENIIYDLTVFEDKKIMKRRLKKKYALPDDKVKQILKLKYKDWSRLSKKLLDGIVADNRFGSSVTVLDVLEMSRLNLMEIINDKDLGYAQMIEEATSCPEDGKFTYEEVERLAGSPALKRGIWQSLQIVEEITKVMKCRPKYIYIEFERSEEAKERTESKIKKLENVYKDLDEQTKKEYKSVLEELKGFDNTKKISSDSLFLYFTQLGKCMYSGKKLDIDSLDKYQIDHIVPQSLVKDDSFDNRVLVVPSENQRKLDDLVVPFDIRDKMYRFWKLLFDHELISPKKFYSLIKTEYTERDEERFINRQLVETRQITKNVTQIIEDHYSTTKVAAIRANLSHEFRVKNHIYKNRDINDYHHAHDAYIVALIGGFMRDRYPNMHDSKAVYSEYMKMFRKNKNDQKRWKDGFVINSMNYPYEVDGKLIWNPDLINEIKKCFYYKDCYCTTKLDQKSGQLFNLTVLSNDAHADKGVTKAVVPVNKNRSDVHKYGGFSGLQYTIVAIEGQKKKGKKTELVKKISGVPLHLKAASINEKINYIEEKEGLSDVRIIKDNIPVNQMIEMDGGEYLLTSPTEYVNARQLVLNEKQCALIADIYNAIYKQDYDNLDDILMIQLYIELTNKMKVLYPAYRGIAEKFESMNENYVVISKEEKANIIKQMLIVMHRGPQNGNIVYDDFKISDRIGRLKTKNHNLNNIVFISQSPTGIYTKKYKL

SEQ ID NO: 193 - protein, 1389 aa, Artificial Sequence
  Synthetic polypeptide
MDKKYSIGLDIGTNSVGWAVITDEYKVPSKKFKVLGNTDRHSIKKNLIGALLFDSGETAEATRLKRTARRRYTRRKNRICYLQEIFSNEMAKVDDSFFHRLEESFLVEEDKKHERHPIFGNIVDEVAYHEKYPTIYHLRKKLVDSTDKADLRLIYLALAHMIKFRGHFLIEGDLNPDNSDVDKLFIQLVQTYNQLFEENPINASGVDAKAILSARLSKSRRLENLIAQLPGEKKNGLFGNLIALSLGLTPNFKSNFDLAEDAKLQLSKDTYDDDLDNLLAQIGDQYADLFLAAKNLSDAILLSDILRVNTEITKAPLSASMIKRYDEHHQDLTLLKALVRQQLPEKYKEIFFDQSKNGYAGYIDGGASQEEFYKFIKPILEKMDGTEELLVKLNREDLLRKQRTFDNGSIPHQIHLGELHAILRRQEDFYPFLKDNREKIEKILTFRIPYYVGPLARGNSRFAWMTRKSEETITPWNFEEVVDKGASAQSFIERMTNFDKNLPNEKVLPKHSLLYEYFTVYNELTKVKYVTEGMRKPAFLSGEQKKAIVDLLFKTNRKVTVKQLKEDYFKKIECFDSVEISGVEDRFNASLGTYHDLLKIIKDKDFLDNEENEDILEDIVLTLTLFEDREMIEERLKTYAHLFDDKVMKQLKRRRYTGWGRLSRKLINGIRDKQSGKTILDFLKSDGFANRNFMQLIHDDSLTFKEDIQKAQVSGQGDSLHEHIANLAGSPAIKKGILQTVKVVDELVKVMGRHKPENIVIEMARENQTTQKGQKNSRERMKRIEEGIKELGSQILKEHPVENTQLQNEKLYLYYLQNGRDMYVDQELDINRLSDYDVDHIVPQSFLKDDSIDNKVLTRSDKNRGKSDNVPSEEVVKKMKNYWRQLLNAKLITQRKFDNLTKAERGGLSELDKAGFIKRQLVETRQITKHVAQILDSRMNTKYDENDKLIREVKVITLKSKLVSDFRKDFQFYKVREINNYHHAHDAYLNAVVGTALIKKYPKLESEFVYGDYKVYDVRKMIAKSEQEIGKATAKYFFYSNIMNFFKTEITLANGEIRKRPLIETNGETGEIVWDKGRDFATVRKVLSMPQVNIVKKTEVQTGGFSKESILPKRNSDKLIARKKDWDPKKYGGFDSPTVAYSVLVVAKVEKGKSKKLKSVKELLGITIMERSSFEKNPIDFLEAKGYKEVKKDLIIKLPKYSLFELENGRKRMLASAGELQKGNELALPSKYVNFLYLASHYEKLKGSPEDNEQKQLFVEQHKHYLDEIIEQISEFSKRVILADANLDKVLSAYNKHRDKPIREQAENIIHLFTLTNLGAPAAFKYFDTTIDRKRYTSTKEVLDATLIHQSITGLYETRIDLSQLGGDGGSGPPKKKRKVYPYDVPDYA

SEQ ID NO: 194 - protein, 1335 aa, Clostridiales bacterium S5-A11
MKNYTIGLDIGTNSVGWAVIKDDLTLVRKKIKISGNTDKKEVKKNLWGSFLFEQGDTAQDTRVKRIARRRYERRRFRIRELQKIFDKSMGEVDSNFFHRLDESFLVEEDKEYSKYPIFSNEKEDKNYYDKYPTIYHLRKDLADSNQKADLRLIYLALAHMIKYRGHFLIEGDLKMDGISISESFQEFIDSYNEVCALEDENLEIIYNDELLTQIENIFKQDISRSKKLDQAIALFQGVKRQSLFGIFLTLIVGNKANFQKIFNLEDDIKLDLKEEDYDENLEELLSNIDEGYRDVFLQAKNVYNAIELSKILKTDGKETKAPLSAQMVELYNQHREDLKKYKDYIKAYLPEKYGETFKDATKNGYAGYIDGKTSQEDFYKFVKAQLKGEENGEYFLEAIENENFLRKQRSFYNGVIPYQIHLQELTAVLDQQEKHYSFLKENRDKIISLLTFRIPYYVGPLAKGESRFAWLERSNSEEKIKPWNFDKIVDIDKSAELFIENLTSRDTYLPDEPVLPKRSLIYQKFTIFNELTKISYIDERGILQNFSSREKIAIFNDLFKNKSKVTKNQLVKYIENKEQIIAPEIKGIEDSFNSNYSTYIDLSKIPDMKKLLEKDEDEILEEIIKILTIFEDRKMRKRQLMKFKDKLSEKAINQLSKKHYTGWGQLSEKLINGIRDEQSNKTILDYLIEDNGCPKNMNRNFMQLINDDTLSFKEKIRKAQDINQVNDIKEIVKDLPGSPAIKKGIYQSIRIVDEIIRKMKDRPKNIVIEMARENQTTQEGKNKSKARLKKIQEGLENLDSVHVEKQALDEEMLKSPKYYLYCLQNGKDIYTGKDLDIGQLQTYDIDHIIPRSFITDNSFDNLVLTSSTVNRGKLDNVPSPDIVRQQKGFWKQLLRAGLMSQRKFNNLTKGKLTDRDRQQFINRQLVETRQITKHVANLLSHHLNEKKEVGEINIVLLKSALTSQFRKKFDFYKVREVNDYHHAHDAYLNGVIALKLLELYPYMAKDLIYGKYSYHRKIEGDKATQAKYKMSNIIERFSQDLLANPDGEIAWEKDKDLNTIRKVLSSKQINIIKKAEEGKGRLFKETINSRPSKKTEKRIPIKNNLDPNIYGGYIEEKMAYYIAINYLENGKTKKAIVGISIKDKKDFEGQTTEYLGKIGFNKASIINSFKNYTLFELENGSRRMIVGASKENDSKGELQKGNQMYLPQNLLEFVYHLKHYNEDETSHKFIVEHKAYFDELLNYIVEFANKYLELENSIEKIKDLYHGKGPDVEEKELVESFINLLAITKCGPAADITFLGEKISRKRYRSTNCLWGSEVIFQSPTGLYETRLRLE

SEQ ID NO: 195 - protein, 1384 aa, Artificial Sequence
  Synthetic polypeptide
MDKKYSIGLDIGTNSVGWAVITDEYKVPSKKFKVLGNTDRHSIKKNLIGALLFDSGETAEATRLKRTARRRYTRRKNRICYLQEIFSNEMAKVDDSFFHRLEESFLVEEDKKHERHPIFGNIVDEVAYHEKYPTIYHLRKKLVDSTDKADLRLIYLALAHMIKFRGHFLIEGDLNPDNSDVDKLFIQLVQTYNQLFEENPINASGVDAKAILSARLSKSRRLENLIAQLPGEKKNGLFGNLIALSLGLTPNFKSNFDLAEDAKLQLSKDTYDDDLDNLLAQIGDQYADLFLAAKNLSDAILLSDILRVNTEITKAPLSASMIKRYDEHHQDLTLLKALVRQQLPEKYKEIFFDQSKNGYAGYIDGGASQEEFYKFIKPILEKMDGTEELLVKLNREDLLRKQRTFDNGSIPHQIHLGELHAILRRQEDFYPFLKDNREKIEKILTFRIPYYVGPLARGNSRFAWMTRKSEETITPWNFEEVVDKGASAQSFIERMTNFDKNLPNEKVLPKHSLLYEYFTVYNELTKVKYVTEGMRKPAFLSGEQKKAIVDLLFKTNRKVTVKQLKEDYFKKIECFDSVEISGVEDRFNASLGTYHDLLKIIKDKDFLDNEENEDILEDIVLTLTLFEDREMIEERLKTYAHLFDDKVMKQLKRRRYTGWGRLSRKLINGIRDKQSGKTILDFLKSDGFANRNFMQLIHDDSLTFKEDIQKAQVSGQGDSLHEHIANLAGSPAIKKGILQTVKVVDELVKVMGRHKPENIVIEMARENQTTQKGQKNSRERMKRIEEGIKELGSQILKEHPVENTQLQNEKLYLYYLQNGRDMYVDQELDINRLSDYDVDHIVPQSFLKDDSIDNKVLTRSDKNRGKSDNVPSEEVVKKMKNYWRQLLNAKLITQRKFDNLTKAERGGLSELDKAGFIKRQLVETRQITKHVAQILDSRMNTKYDENDKLIREVKVITLKSKLVSDFRKDFQFYKVREINNYHHAHDAYLNAVVGTALIKKYPKLESEFVYGDYKVYDVRKMIAKSEQEIGKATAKYFFYSNIMNFFKTEITLANGEIRKRPLIETNGETGEIVWDKGRDFATVRKVLSMPQVNIVKKTEVQTGGFSKESILPKRNSDKLIARKKDWDPKKYGGFDSPTVAYSVLVVAKVEKGKSKKLKSVKELLGITIMERSSFEKNPIDFLEAKGYKEVKKDLIIKLPKYSLFELENGRKRMLASAGELQKGNELALPSKYVNFLYLASHYEKLKGSPEDNEQKQLFVEQHKHYLDEIIEQISEFSKRVILADANLDKVLSAYNKHRDKPIREQAENIIHLFTLTNLGAPAAFKYFDTTIDRKRYTSTKEVLDATLIHQSITGLYETRIDLSQLGGDGSPKKKRKVSSGGAAG

SEQ ID NO: 196 - protein, 1332 aa, Dolosigranulum pigrum
MQKNYTIGLDIGTNSVGWAVMKDDYTLIRKRMKVLGNTDIKKIKKNFWGVRLFDEGETAKETRLKRGTRRRYQRRRNRLIYLQDIFQQPMLAIDENFFHRLDDSFFVPDDKSYDRHPIFGSLEEEVAYHNTYPTIYHLRKHLADNPEKADLRLVYTALAHIVKYRGHFLIEGELNTENTSISETFEQFLDTYSDIFKEQLVGDISKVEEILSSKQSRSRKHEQIMALFPNENKLGNFGRFMMLIVGNTSNFKPVFDLDDEYKLKLSDETYEEDLDTLLGMTDDVFLDVFMAAKNVYDAVEMSAIISTDTGNSKAVLSNQMINFYDEHKVDLAQLKQFFKTHLPDKYYECFSDPSKNGYAGYIDGKTNQEDFYKYIEKVMKTIKSDKKDYFLDKIDREVFLRKQRSFYNSVIPHQIHLQEMQAILDRQSQYYPFLAENRDKIESLVTFRIPYYVGPLTVSDQSEFAWMERQSDEPIRPWNFDEIVNKERSAEKFIERMTNMDTYLLEEKVLPKRSLLYQTFEVYNELTKVRYTNEQGKTEKLNRQQKAEIIETLFKQKNRVREKDIANYLEQYGYVDGTDIKGVEDKFNASLSTYNDLAKIDGAKAYLDDPEYADVWEDIIKILTIFEDKAMRKKQLQTYSDTLSPEILKKLERKHYTGWGRFSKKLINGLRDEGSNKTILDYLKSDEGSSGPTNRNFMQLIRDNTLSFKKKIEDAQTIEDTTHIYDTVAELPGSPAIKKGIRQALKIVEEIIDIIGYEPENIVVEMARESQTTKKGKDLSKERLEKLTEAIKEFDGPSDVKVKDLKNENLRNDRLYLYYLQNGRDMYTNEPLDINNLSKYDIDHIIPQSFTTDNSIDNKVLVSRTKNQGNKSDDVPSINIVHKMKPFWRQLHKAGLISDRKFKNLTKAEHGGLTEADRAHFLNRQLVETRQITKHVANLLDSQYNTAEEQRINIVLLKSSMTSRFRKEFKLYKVREINDYHHGHDAYLNAVVATTIMKVYPNLKPQFVYGQYKKTSMFKEEKATARKHFYSNITKFFKKEKVVNEETGEILWDTERHLSTIKRVLSWKQMNIVKKVEKQKGQLWKETIYPKGDSSKLIPVKEGMDPQKYGGLSQVSEAFAVVITHEKGKKKQLKSDLISIPIVDQKAYEQHPTAYLEEAGYNNPTVLHELFKYQLFELEDGSRRMIASAKEFQKGNQMVLPLELVELLYHANRYDKVKFPDSIEYVHDNLAKFDDLLEYVIDFSNKYINADKNVQKIQKIYKEHGTEDVELTVESFVNLMTFTAMGAPATFKFYGESITRSRYTSITEFRGSTLIFQSITGLYETRYKLEDN

SEQ ID NO: 197 - protein, 1337 aa, Enterococcus
MKKDYVIGLDIGTNSVGWAVMTEDYQLVKKKMPIYGNTEKKKIKKNFWGVRLFEEGHTAEDRRLKRTARRRISRRRNRLRYLQAFFEEAMTDLDENFFARLQESFLVPEDKKWHRHPIFAKLEDEVAYHETYPTIYHLRKKLADSSEQADLRLIYLALAHIVKYRGHFLIEGKLSTENISVKEQFQQFMIIYNQTFVNGESRLVSAPLPESVLIEEELTEKASRTKKSEKVLQQFPQEKANGLFGQFLKLMVGNKADFKKVFGLEEEAKITYASESYEEDLEGILAKVGDEYSDVFLAAKNVYDAVELSTILADSDKKSHAKLSSSMIVRFTEHQEDLKKFKRFIRENCPDEYDNLFKNEQKDGYAGYIAHAGKVSQLKFYQYVKKIIQDIAGAEYFLEKIAQENFLRKQRTFDNGVIPHQIHLAELQAIIHRQAAYYPFLKENQEKIEQLVTFRIPYYVGPLSKGDASTFAWLKRQSEEPIRPWNLQETVDLDQSATAFIERMTNFDTYLPSEKVLPKHSLLYEKFMVFNELTKISYTDDRGIKANFSGKEKEKIFDYLFKTRRKVKKKDIIQFYRNEYNTEIVTLSGLEEDQFNASFSTYQDLLKCGLTRAELDHPDNAEKLEDIIKILTIFEDRQRIRTQLSTFKGQFSAEVLKKLERKHYTGWGRLSKKLINGIYDKESGKTILGYLIKDDGVSKHYNRNFMQLINDSQLSFKNAIQKAQSSEHEETLSETVNELAGSPAIKKGIYQSLKIVDELVAIMGYAPKRIVVEMARENQTTSTGKRRSIQRLKIVEKAMAEIGSNLLKEQPTTNEQLRDTRLFLYYMQNGKDMYTGDELSLHRLSHYDIDHIIPQSFMKDDSLDNLVLVGSTENRGKSDDVPSKEVVKDMKAYWEKLYAAGLISQRKFQRLTKGEQGGLTLEDKAHFIQRQLVETRQITKNVAGILDQRYNANSKEKKVQIITLKASLTSQFRSIFGLYKVREVNDYHHGQDAYLNCVVATTLLKVYPNLAPEFVYGEYPKFQTFKENKATAKAIIYTNLLRFFTEDEPRFTKDGEILWSNSYLKTIKKELNYHQMNIVKKVEVQKGGFSKESIKPKGPSNKLIPVKNGLDPQKYGGFDSPIVAYTVLFTHEKGKKPLIKQEILGITIMEKTRFEQNPILFLEEKGFLRPRVLMKLPKYTLYEFPEGRRRLLASAKEAQKGNQMVLPEHLLTLLYHAKQCLLPNQSESLAYVEQHQPEFQEILERVVDFAEVHTLAKSKVQQIVKLFEANQTADVKEIAASFIQLMQFNAMGAPSTFKFFQKDIERARYTSIKEIFDATIIYQSTTGLYETRRKVVD

SEQ ID NO: 198 - protein, 1288 aa, Enterococcus
MRLFEEGHTAEDRRLKRTARRRISRRRNRLRYLQAFFEEAMTDLDENFFARLQESFLVPEDKKWHRHPIFAKLEDEVAYHETYPTIYHLRKKLADSSEQADLRLIYLALAHIVKYRGHFLIEGKLSTENTSVKDQFQQFMVIYNQTFVNGESRLVSAPLPESVLIEEELTEKASRTKKSEKVLQQFPQEKANGLFGQFLKLMVGNKADFKKVFGLEEEAKITYASESYEEDLEGILAKVGDEYSDVFLAAKNVYDAVELSTILADSDKKSHAKLSSSMIVRFTEHQEDLKKFKRFIRENCPDEYDNLFKNEQKDGYAGYIAHAGKVSQLKFYQYVKKIIQDIAGAEYFLEKIAQENFLRKQRTFDNGVIPHQIHLAELQAIIHRQAAYYPFLKENQEKIEQLVTFRIPYYVGPLSKGDASTFAWLKRQSEEPIRPWNLQETVDLDQSATAFIERMTNFDTYLPSEKVLPKHSLLYEKFMVFNELTKISYTDDRGIKANFSGKEKEKIFDYLFKTRRKVKKKDIIQFYRNEYNTEIVTLSGLEEDQFNASFSTYQDLLKCGLTRAELDHPDNAEKLEDIIKILTIFEDRQRIRTQLSTFKGQFSAEVLKKLERKHYTGWGRLSKKLINGIYDKESGKTILDYLVKDDGVSKHYNRNFMQLINDSQLSFKNAIQKAQSSEHEETLSETVNELAGSPAIKKGIYQSLKIVDELVAIMGYAPKRIVVEMARENQTTSTGKRRSIQRLKIVEKAMAEIGSNLLKEQPTTNEQLRDTRLFLYYMQNGKDMYTGDELSLHRLSHYDIDHIIPQSFMKDDSLDNLVLVGSTENRGKSDDVPSKEVVKDMKAYWEKLYAAGLISQRKFQRLTKGEQGGLTLEDKAHFIQRQLVETRQITKNVAGILDQRYNAKSKEKKVQIITLKASLTSQFRSIFGLYKVREVNDYHHGQDAYLNCVVATTLLKVYPNLAPEFVYGEYPKFQTFKENKATAKAIIYTNLLRFFTEDEPRFTKDGEILWSNSYLKTIKKELNYHQMNIVKKVEVQKGGFSKESIKPKGPSNKLIPVKNGLDPQKYGGFDSPVVAYTVLFTHEKGKKPLIKQEILGITIMEKTRFEQNPILFLEEKGFLRPRVLMKLPKYTLYEFPEGRRRLLASAKEAQKGNQMVLPEHLLTLLYHAKQCLLPNQSESLAYVEQHQPEFQEILERVVDFAEVHTLAKSKVQQIVKLFEANQTADVKEIAASFIQLMQFNAMGAPSTFKFFQKDIERARYTSIKEIFDATIIYQSPTGLYETRRKVVD

SEQ ID NO: 199 - protein, 1079 aa, Enterococcus durans IPLA 655
MDEEAKIQLSKESYEEELESLLEKSGEEFRDVFLQAKKVYDAILLSDILSTKKQNSKAKLSLGMIERYDSHKKDLEELKQFVKANLPEKTAIFFKDSSKNGYAGYIDGKTTQEDFYKFLKKELNGIAGSERFMEKVDQENFLLKQRTTANGVIPHQVHLTELKAIIERQKPYYPSLEEARDKMIRLLTFRIPYYVGPLAQGEETSSFAWLERKTPEKVTPWNATEVIDYSASAMKFIQRMINYDTYLPTEKVLPKHSILYQKYTIFNELTKVAYKDERGIKHQFSSKEKREIFKELFQKQRKVTVKKLQQFLSANYNIEDAEILGVDKAFNSSYATYHDFLDLAKPNTERVAELLEQPEMNAMFEDIVKILTIFEDREMIRTQLKKYQSVLGDGFFKKLVKKHYTGWGRLSERLINGIRDKKTNKTILDYLIDDDDFPYNRNRNFMQLINDDSLSFKEELANELALAGNQSLLEVVEALLGSPAIKKGIWQTLKIVEELIEIIGYNPKNIVVEMARENQRTNRSKPRLKALEEALKSFDSPLLKEQPVDNQALQKDRLYLYYLQNGKDMYTGEALDIDRLSEYDIDHIIPRSFIVDNSIDNKVLVSSKENRLKMDDVPDQKVVIRMRRYWEKLLRANLISERKFAYLTKLELTPEDKARFIQRQLVETRQITKHVAAILDQYFNQPEESKNKGIRIITLKSSLVSQFRKTFGINKVREINNHHHAHDAYLNGVVAIALLKKYPKLEPEFVYGNYTKFNLATENKATAKKEFYSNILRFFEKEEYSYDENGEIFWDKARHIPQIKKVISSHQVNIVKKVEVQTGGFYKETVNPKGKPDKLIQRKAGWDVSKYGGFGSPVVAYAVAFIYEKGKARKKAKAIEGITIMKQSLFEQDPIGFLSNKGYSNVTKFIKLSKYTLYELENGRRRMVASHKEAQKANSFILPEKLVTLLYHAQHYDEIAHKESFDYVNDHLSEFREILDQVIDFSNRYTIAAKNTEKIAELFEQNQESTVQSLSQSFINLMQLNAMGAPADFKFFDVIIPRKRYPSLTEIWESTIIYQSITGLRETRTRMATLWDGEQ

SEQ ID NO: 200 - protein, 1337 aa, Enterococcus faecalis
MKKDYVIGLDIGTNSVGWAVMTEDYQLVKKKMPIYGNTEKKKIKKNFWGVRLFEEGHTAEDRRLKRTARRRISRRRNRLRYLQAFFEEAMTDLDENFFARLQESFLVPEDKKWHRHPIFAKLEDEVAYHETYPTIYHLRKKLADSSEQADLRLIYLALAHIVKYRGHFLIEGKLSTENTSVKEQFQQFMVIYNQTFVNGESRLVSAPLPESVLIEEELTEKASRTKKSEKVLQQFPQEKANGLFGQFLKLMVGNKADFKKVFGLEEEAKITYASESYEEDLEGILAKVGDEYSDVFLAAKNVYDAVELSTILADSDKKSHAKLSSSMIVRFTEHQEDLKKFKRFIRENCPDEYDNLFKNEQKDGYAGYIAHAGKVSQLKFYQYVKKIIQDIAGAEYFLEKIAQENFLRKQRTFDNGVIPHQIHLAELQAIIHRQAAYYPFLKENQEKIEQLVTFRIPYYVGPLSKGDASTFAWLKRQSEEPIRPWNLQETVDLDQSATAFIERMTNFDTYLPSEKVLPKHSLLYEKFMVFNELTKISYTDDRGIKANFSGKEKEKIFDYLFKTRRKVKKKDIIQFYRNEYNTEIVTLSGLEEDQFNASFSTYQDLLKCGLTRAELDHPDNAEKLEDIIKILTIFEDRQRIRTQLSTFKGQFSAEVLKKLERKHYTGWGRLSKKLINGIYDKESGKTILDYLVKDDGVSKHYNRNFMQLINDSQLSFKNAIQKAQSSEHEETLSETVNELAGSPAIKKGIYQSLKIVDELVAIMGYAPKRIVVEMARENQTTSTGKRRSIQRLKIVEKAMAEIGSNLLKEQPTTNEQLRDTRLFLYYMQNGKDMYTGDELSLHRLSHYDIDHIIPQSFMKDDSLDNLVLVGSTENRGKSDDVPSKKVVKKMKAYWEKLYAAGLISQRKFQRLTKGEQGGLTLEDKAHFIQRQLVETRQITKNVAGILDQRYNAKSKEKKVQIITLKASLTSQFRSIFGLYKVREVNDYHHGQDAYLNCVVATTLLKVYPNLAPEFVYGEYPKFQAFKENKATAKTIIYTNLMRFFTEDEPRFTKDSEILWSNSYLKTIKKELNYHQMNIVKKVEVQKGGFSKESIKPKGPSNKLIPVKNGLDPQKYGGFDSPVVAYTVLFTHEKGKKPLIKQEILGITIMEKTRFEQNPILFLEEKGFLRPRVLMKLPKYTLYEFPEGRRRLLASAKEAQKGNQMVLPEHLLTLLYHAKQCLLPNQSESLAYVEQHQPEFQEILERVVDFAEVHTLAKSKVQQIVKLFEANQTADVKEIAASFIQLMQFNAMGAPSTFKFFQKDIERARYTSIKEIFDATIIYQSTTGLYETRRKVVD

SEQ ID NO: 201 - protein, 1337 aa, Enterococcus faecalis
MKKDYVIGLDIGTNSVGWAVMTEDYQLVKKKMPIYGNTEKKKIKKNFWGVRLFEEGHTAEDRRLKRTARRRISRRRNRLRYLQAFFEEAMTALDENFFARLQESFLVPEDKKWHRHPIFAKLEDEVAYHETYPTIYHLRKKLADSSEQADLRLIYLALAHIVKYRGHFLIEGKLSTENISVKEQFQQFMIIYNQTFVNGESRLVSAPLPESVLIEEELTEKASRTKKSEKVLQQFPQEKANGLFGQFLKLMVGNKADFKKVFGLEEEAKITYASESYEEDLEGILAKVGDEYSDVFLAAKNVYDAVELSTILADSDKKSHAKLSSSMIVRFTEHQEDLKNFKRFIRENCPDEYDNLFKNEQKDGYAGYITHAGKVSQLKFYQYVKKIIQDIAGAEYFLEKIAQENFLRKQRTFDNGVIPHQIHLAELQAIIHRQAAYYPFLKENQEKIEQLVTFRIPYYVGPLSKGDANTFAWLKRQSEEPIRPWNLQETVDLDQSATAFIERMTNFDTYLPSEKVLPKHSLLYEKFMVFNELTKISYTDDRGIKANFSGKEKEKIFDYLFKTRRKVKKKDIIQFYRNEYNTEIVTLSGLEEDQFNASFSTYQDLLKCGLTRAELDHPDNAEKLEDIIKILTIFEDRQRIRTQLSTFKGQFSAEVLKKLERKHYTGWGRLSKKLINGIYDKESGKTILDYLIKDDGVSKHYNRNFMQLINDSQLSFKNAIQKAQSSEHEETLSETVNELAGSPAIKKGIYQSLKIVDELVAIMGYAPKRIVVEMARENQTTSTGKRRSIQRLKIVEKAMAEIGSNLLKEQPTTNEQLRDTRLFLYYMQNGKDMYTGDELSLHRLSHYDIDHIIPQSFMKDDSLDNLVLVGSTENRGKSDDVPSKEVVKDMKAYWEKLYAAGLISQRKFQRLTKGEQGGLTLEDKAHFIQRQLVETRQITKNVAGILDQRYNAKSKEKKVQIITLKASLTSQFRSIFGLYKVREVNDYHHGQDAYLNCVVATTLLKVYPNLAPEFVYGEYPKFQTFKENKATAKAIIYTNLLRFFTEDEPRFTKDGEILWSNSYLKTIKKELNYHQMNIVKKVEVQKGGFSKESIKPKGPSNKLIPVKNGLDPQKYGGFDSPIVAYTVLFTHEKGKKPLIKQEILGITIMEKTRFEQNPILFLEEKGFLRPRVLMKLPKYTLYQFPEGRRRLLASAKEAQKGNQMVLPEHLLTLLYHAKQCLLPNQSESLAYVEQHQPEFQEILERVVDFAEVHTLAKSKVQQIVKLFEANQTADVKEIAASFIQLMQFNAMGAPSTFKFFQKDIERARYTSIKEIFDATIIYQSTTGLYETRRKVVD

SEQ ID NO: 202 - protein, 1337 aa, Enterococcus faecalis
MKKDYVIGLDIGTNSVGWAVMTEDYQLVKKKMPIYGNTEKKKIKKNFWGVRLFEEGHTAEDRRLKRTARRRISRRRNRLRYLQAFFEEAMTALDENFFARLQESFLVPEDKKWHRHPIFAKLEDEVAYHETYPTIYHLRKKLADSSEQADLRLIYLALAHIVKYRGHFLIEGKLSTENISVKEQFQQFMIIYNQTFVNGESRLVSTPLPESVLIEEELTEKASRTKKSEKVLQQFPQEKANGLFGQFLKLMVGNKADFKKVFGLEEEAKITYASESYEEDLEGILAKVGDEYSDVFLAAKNVYDAVELSTILADSDKKSHAKLSSSMIVRFTEHQEDLKNFKRFIRENCPDEYDNLFKNEQKDGYAGYITHAGKVSQLKFYQYVKKIIQDIAGAEYFLEKIAQENFLRKQRTFDNGVIPHQIHLAELQAIIHRQAAYYPFLKENQEKIEQLVTFRIPYYVGPLSKGDASTFAWLKRQSEEPIRPWNLQETVDLDQSATAFIERMTNFDTYLPSEKVLPKHSLLYEKFMVFNELTKISYTDDRGIKANFSGKEKEKIFDYLFKTRRKVKKKDIIQFYRNEYNTEIVTLSGLEEDQFNASFSTYQDLLKCGLTRAELDHPDNAEKLEDIIKILTIFEDRQRIRTQLSTFKGQFSAEVLKKLERKHYTGWGRLSKKLINGIYDKESGKTILDYLVKDDGVSKHYNRNFMQLINDSQLSFKNAIQKAQSSEHEETLSETVNELAGSPAIKKGIYQSLKIVDELVAIMGYAPKRIVVEMARENQTTSTGKRRSIQRLKIVEKAMAEIGSNLLKEQPTTNEQLRDTRLFLYYMQNGKDMYTGDELSLHRLSHYDIDHIIPQSFMKDDSLDNLVLVGSTENRGKSDDVPSKEVVKDMKAYWEKLYAAGLISQRKFQRLTKGEQGGLTLEDKAHFIQRQLVETRQITKNVAGILDQRYNAKSKEKKVQIITLKASLTSQFRSIFGLYKVREVNDYHHGQDAYLNCVVATTLLKVYPNLAPEFVYGEYPKFQTFKENKATAKAIIYTNLLRFFTEDEPRFTKDGEILWSNSYLKTIKKELNYHQMNIVKKVEVQKGGFSKESIKPKGPSNKLIPVKNGLDPQKYGGFDSPIVAYTVLFTHEKGKKPLIKQEILGITIMEKTRFEQNPILFLEEKGFLRPRVLMKLPKYTLYEFPEGRRRLLASAKEAQKGNQMVLPEHLLTLLYHAKQCLLPNQSESLAYVEQHQPEFQEILERVVDFAEVHTLAKSKVQQIVKLFEANQTADVKEIAASFIQLMQFNAMGAPSTFKFFQKDIERARYTSIKEIFDATIIYQSTTGLYETRRKVVD

SEQ ID NO: 203 - protein, 1337 aa, Enterococcus faecalis
MKKDYVIGLDIGTNSVGWAVMTEDYQLVKKKMPIYGNTEKKKIKKNFWGVRLFEEGHTAEDRRLKRTARRRISRRRNRLRYLQAFFEEAMTDLDENFFARLQESFLVPEDKKWHRHPIFAKLEDEVAYHETYPTIYHLRKKLADSSEQADLRLIYLALAHIVKYRGHFLIEGKLSTENISVKEQFQQFMIIYNQTFVNGESRLVSAPLPESVLIEEELTEKASRTKKSEKVLQQFPQEKANGLFGQFLKLMVGNKADFKKVFGLEEEAKITYASESYEEDLEGILAKVGDEYSDVFLAAKNVYDAVELSTILADSDKKSHAKLSSSMIVRFTEHQEDLKKFKRFIRENCPDEYDNLFKNEQKDGYAGYIAHAGKVSQLKFYQYVKKIIQDIAGAEYFLEKIAQENFLRKQRTFDNGVIPHQIHLAELQAIIHRQAAYYPFLKENQEKIEQLVTFRIPYYVGPLSKGDASTFAWLKRQSEEPIRPWNLQETVDLDQSATAFIERMTNFDTYLPSEKVLPKHSLLYEKFMVFNELTKISYTDDRGIKANFSGKEKEKIFDYLFKTRRKVKKKDIIQFYRNEYNTEIVTLSGLEEDQFNASFSTYQDLLKCGLTRAELDHPDNAEKLEDIIKILTIFEDRQRIRTQLSTFKGQFSAEVLKKLERKHYTGWGRLSKKLINGIYDKESGKTILDYLVKDDGVSKHYNRNFMQLINDSQLSFKNAIQKAQSSEHEETLSETVNELAGSPAIKKGIYQSLKIVDELVAIMGYAPKRIVVEMARENQTTSTGKRRSIQRLKIVEKAMAEIGSNLLKEQPTTNEQLRDTRLFLYYMQNGKDMYTGDELSLHRLSHYDIDHIIPQSFMKDDSLDNLVLVGSTENRGKSDDVPSKEVVKDMKAYWEKLYAAGLISQRKFQRLTKGEQGGLTLEDKAHFIQRQLVETRQITKNVAGILNQRYNANSKEKKVQIITLKASLTSQFRSIFGLYKVREVNDYHHGQDAYLNCVVATTLLKVYPNLAPEFVYGEYPKFQTFKENKATAKAIIYTNLLRFFTEDEPRFTKDGEILWSNSYLKTIKKELNYHQMNIVKKVEVQKGGFSKESIKPKGPSNKLIPVKNGLDPQKYGGFDSPVVAYTVLFTHEKGKKPLIKQEILGITIMEKTRFEQNPILFLEEKGFLRPRVLMKLPKYTLYEFPEGRRRLLASAKEAQKGNQMVLPEHLLTLLYHAKQCLLPNQSESLAYVEQHQPEFQEILERVVDFAEVHTLAKSKVQQIVKLFEANQTADVKEIAASFIQLMQFNAMGAPSTFKFFQKDIERARYTSIKEIFDATIIYQSTTGLYETRRKVVD

SEQ ID NO: 204 - protein, 1339 aa, Enterococcus faecalis
MKKDYVIGLDIGTNSVGWAVMTEDYQLVKKKMPIYGNTEKKKIKKNFWGVRLFEEGHTAEDRRLKRTARRRISRRRNRLRYLQAFFEEAMTALDENFFARLQESFLVPEDKKWHRHPIFAKLEDEVAYHETYPTIYHLRKKLADSSEQADLRLIYLALAHIVKYRGHFLIEGKLSTENISVKEQFQQFMIIYNQTFVNGESRLVSAPLPESVLIEEELTEKASRTKKSEKVLQQFPQEKANGLFGQFLKLMVGNKADFKKVFGLEEEAKIKITYASESYEEDLEGILAKVGDEYSDVFLAAKNVYDAVELSTILADSDKKSHAKLSSSMIVRFTEHQEDLKNFKRFIRENCPDEYDNLFKNEQKDGYAGYIAHAGKVSQLKFYQYVKKIIQDIAGAEYFLEKIAQENFLRKQRTFDNGVIPHQIHLAELQAIIHRQAAYYPFLKENQKKIEQLVTFRIPYYVGPLSKGDASTFAWLKRQSEEPIRPWNLQETVDLDQSATAFIERMTNFDTYLPSEKVLPKHSLLYEKFMVFNELTKISYTDDRGIKANFSGKEKEKIFDYLFKTRRKVKKKDIIQFYRNEYNTEIVTLSGLEEDQFNASFSTYQDLLKCGLTRAELDHPDNAEKLEDIIKILTIFEDRQRIRTQLSTFKGQFSEEVLKKLERKHYTGWGRLSKKLINGIYDKESGKTILDYLIKDDGVSKHYNRNFMQLINDSQLSFKNAIQKAQSSEHEETLSETVNELAGSPAIKKGIYQSLKIVDELVAIMGYAPKRIVVEMARENQTTSTGKRRSIQRLKIVEKAMAEIGSNLLKEQPTTNEQLRDTRLFLYYMQNGKDMYTGDELSLHRLSHYDIDHIIPQSFMKDDSLDNLVLVGSTENRGKSDDVPSKEVVKKMKAYWEKLYAAGLISQRKFQRLTKGEQGGLTLEDKAHFIQRQLVETRQITKNVAGILDQRYNAKSKEKKVQIITLKASLTSQFRSIFGLYKVREVNDYHHGQDAYLNCVVATTLLKVYPNLAPEFVYGEYPKFQAFKENKATAKAIIYTNLLRFFTEDEPRFTKDGEILWSNSYLKTIKKELNYHQMNIVKKVEVQKGGFSKESIKPKGPSNKLIPVKNGLDPQKYGGFDSPVVAYTVLFTHEKGKKPLIKQEILGITIMEKTRFEQNPILFLEEKGFLRPRVLMKLPKYTLYEFPEGRRRLLASAKEAQKGNQMVLPEHLLTLLYHAKQCLLPNQSESLAYVEQHQPEFQEILERVVDFAEVHTLAKSKVQQIVKLFEANQTADVKEIAASFIQLMQFNAMGAPSTFKFFQKDIERARYTSIKEIFDATIIYQSTTGLYETRRKVVD

SEQ ID NO: 205 - protein, 1337 aa, Enterococcus faecalis
MKKDYVIGLDIGTNSVGWAVMTEDYQLVKKKMPIYGNTEKKKIKKNFWGVRLFEEGHTAEDRRLKRTARRRISRRRNRLRYLQAFFEEAMTALDENFFARLQESFLVPEDKKWHRHPIFAKLEDEVAYHETYPTIYHLRKKLADSSEQADLRLIYLALAHIVKYRGHFLIEGKLSTENISVKEQFQQFMIIYNQTFVNGESRLVSAPLPESVLIEEELTEKASRTKKSEKVLQQFPQEKANGLFGQFLKLMVGNKADFKKVFGLEEEAKITYASESYEEDLEGILAKVGDEYSDVFLAAKNVYDAVELSTILADSDKKSHAKLSSSMIVRFTEHQEDLKKFKRFIRENCPDEYDNLFKNEQKDGYAGYIAHAGKVSQLKFYQYVKKIIQDIAGAEYFLEKIAQENFLRKQRTFDNGVIPHQIHLAELQAIIHRQAAYYPFLKENQEKIEQLVTFRIPYYVGPLSKGDASTFAWLKRQSEEPIRPWNLQETVDLDQSATAFIERMTNFDTYLPSEKVLPKHSLLYEKFMVFNELTKISYTDDRGIKANFSGKEKEKIFDYLFKTRRKVKKKDIIQFYRNEYNTEIVTLSGLEEDQFNASFSTYQDLLKCGLTRAELDHPDNAEKLEDIIKILTIFEDRQRIRTQLSTFKGQFSAEVLKKLERKHYTGWGRLSKKLINGIYDKESGKTILGYLIKDDGVSKHYNRNFMQLINDSQLSFKNAIQKAQSSEHEETLSETVNELAGSPAIKKGIYQSLKIVDELVAIMGYAPKRIVVEMARENQTTSTGKRRSIQRLKIVEKAMAEIGSNLLKEQPTTNEQLRDTRLFLYYMQNGKDMYTGDELSLHRLSHYDIDHIIPQSFMKDDSLDNLVLVGSTENRGKSDDVPSKEVVKDMKAYWEKLYAAGLISQRKFQRLTKGEQGGLTLEDKAHFIQRQLVETRQITKNVAGILDQRYNAKSKEKKVQIITLKASLTSQFRSIFGLYKVREVNDYHHGQDAYLNCVVATTLLKVYPNLAPEFVYGEYPKFQTFKENKATAKAIIYTNLLRFFTEDEPRFTKDGEILWSNSYLKTIKKELNYHQMNIVKKVEVQKGGFSKESIKPKGPSNKLIPVKNGLDPQKYGGFDSPIVAYTVLFTHEKGKKPLIKQEILGITIMEKTRFEQNPILFLEEKGFLRPRVLMKLPKYTLYEFPEGRRRLLASAKEAQKGNQMVLPEHLLTLLYHAKQCLLPNQSESLAYVEQHQPEFQEILERVVDFAEVHTLAKSKVQQIVKLFEANQTADVKEIAASFIQLMQFNAMGAPSTFKFFQKDIERARYTSIKEIFDATIIYQSTTGLYETRRKVVD

SEQ ID NO: 206 - protein, 1337 aa, Enterococcus faecalis
MKKDYVIGLDIGSNSVGWAVMTEDYQLVKKKMPIYGNTEKKKIKKNFWGVRLFEEGHTAEDRRLKRTARRRISRRRNRLRYLQAFFEEAMTDLDENFFARLQESFLVPEDKKWHRHPIFAKLEDEVAYHETYPTIYHLRKKLADSSEQADLRLIYLALAHIVKYRGHFLIEGKLSTENTSVKDQFQQFMVIYNQTFVNGESRLVSAPLPESVLIEEELTEKASRTKKSEKVLQQFPQEKANGLFGQFLKLMVGNKADFKKVFGLEEEAKITYASESYEEDLEGILAKVGDEYSDVFLAAKNVYDAVELSTILADSDKKSHAKLSSSMIVRFTEHQEDLKNFKRFIRENCPDEYDNLFKNEQKDGYAGYITHAGKVSQLKFYQYVKKIIQDIAGAEYFLEKIAQENFLRKQRTFDNGVIPHQIHLAELQAIIHRQAAYYPFLKENQEKIEQLVTFRIPYYVGPLSKGDASTFAWLKRQSEEPIRPWNLQETVDLDQSATAFIERMTNFDTYLPSEKVLPKHSLLYEKFMVFNELTKISYTDDRGIKANFSGKEKEKIFDYLFKTRRKVKKKDIIQFYRNEYNTEIVTLSGLEEDQFNASFSTYQDLLKCGLTRAELDHPDNAEKLEDIIKILTIFEDRQRIRTQLSTFKGQFSAEVLKKLERKHYTGWGRLSKKLINGIYDKESGKTILDYLIKDDGVSKHYNRNFMQLINDSQLSFKNAIQKAQSSEHEETLSETVNELAGSPAIKKGIYQSLKIVDELVAIMGYAPKRIVVEMARENQTTSTGKRRSIQRLKIVEKAMAEIGSNLLKEQPTTNEQLRDTRLFLYYMQNGKDMYTGDELSLHRLSHYDIDHIIPQSFMKDDSLDNLVLVGSTENRGKSDDVPSKEVVKDMKAYWEKLYAAGLISQRKFQRLTKGEQGGLTLEDKAHFIQRQLVETRQITKNVAGILDQLYNAKSKEKKVQIITLKASLTSQFRSIFGLYKVREVNDYHHGQDAYLNCVVATTLLKVYPNLAPEFVYGEYPKFQTFKENKATAKTIIYTNLMRFFTEDEPRFTKDGEILWSNSYLKTIKKELNYHQMNIVKKVEVQKGGFSKESIKPKGPSNKLIPVKNGLDPQKYGGFDSPVVAYTVLFTHEKGKKPLIKQEILGITIMEKTRFEQNPILFLEEKGFLRPRVLMKLPKYTLYEFPEGRRRLLASAKEAQKGNQMVLPEHLLTLLYHAKQCLLPNQSESLAYVEQHQPEFQEILERVVDFAEVHTLAKSKVQQIVKLFEANQTADVKEIAASFIQLMQFNAMGAPSTFKFFQKDIERARYTSIKEIFDATIIYQSTTGLYETRRKVVD

SEQ ID NO: 207 - protein, 1337 aa, Enterococcus faecalis
MKKDYVIGLDIGTNSVGWAVMTEDYQLVKKKMPIYGNTEKKKIKKNFWGVRLFEEGHTAEDRRLKRTARRRISRRRNRLRYLQAFFEEAMTALDENFFARLQESFLVPEDKKWHRHPIFAKLEDEVAYHETYPTIYHLRKKLADSSEQADLRLIYLALAHIVKYRGHFLIEGKLSTENISVKEKFQQFMIIYNQTFVNGEGRLVSAPLPESVLIEEELTEKASRTKKSEKVLQQFPQEKANGLFGQFLKLMVGNKADFKKVFGLEEEAKITYASESYEEDLEGILAKVGDEYSDVFLAAKNVYDAVELSTILADSDKKSYAKLSSSMIVRFTEHQEDLKKFKRFIRENCPDEYDNLFKNEQKDGYAGYIAHAGKVSQLKFYQYVKKIIQDIAGAEYFLEKIAQENFLRKQRTFDNGVIPHQIHLAELQAIIHRQAAYYPFLKENQEKIEQLVTFRIPYYVGPLSKGDASTFAWLKRQSEEPIRPWNLQETVDLDQSATAFIERMTNFDTYLPSEKVLPKHSLLYEKFMVFNELTKISYTDDRGIKANFSGKEKEKIFDYLFKTRRKVKKKDIIQFYRNEYNTEIVTLSGLEEDQFNASFSTYQDLLKCGLTRAELDHPDNAEKLEDIIKILTIFEDRQRIRTQLSTFKGQFSAEVLKKLERKHYTGWGRLSKKLINGIYDKESGKTILDYLVKDDGVSKHYNRNFMQLINDSQLSFKNAIQKAQSSEHEETLSETVNELAGSPAIKKGIYQSLKIVDELVAIMGYAPKRIVVEMARENQTTSTGKRRSIQRLKIVEKAMAEIGSNLLKEQPTTNEQLRDTRLFLYYMQNGKDMYTGDELSLHRLSHYDIDHIIPQSFMKDDSLDNLVLVGSTENRGKSDDVPSKEVVKDMKAYWEKLYAAGLISQRKFQRLTKGEQGGLTLEDKAHFIQRQLVETRQITKNVAGILDQRYNAKSKEKKVQIITLKASLTSQFRSIFGLYKVREVNDYHHGQDAYLNCVVATTLLKVYPNLAPEFVYGEYPKFQTFKENKATAKAIIYTNLLRFFTEDEPRFTKDGEILWSNSYLKTIKKELNYHQMNIVKKVEVQKGGFSKESIKPKGPSNKLIPVKNGLDPQKYGGFDSPIVAYTVLFTHEKGKKPLIKQEILGITIMEKTRFEQNPILFLEEKGFLRPRVLMKLPKYTLYEFPEGRRRLLASAKEAQKGNQMVLPEHLLTLLYHAKQCLLPNQSESLAYVEQHQPEFQEILERVVDFAEVHTLAKSKVQQIVKLFEANQTADVKEIAASFIQLMQFNAMGAPSTFKFFQKDIERARYTSIKEIFDATIIYQSTTGLYETRRKVVD

SEQ ID NO: 208 - protein, 1337 aa, Enterococcus faecalis
MKKDYVIGLDIGTNSVGWAVMTEDYQLVKKKMPIYGNTEKKKIKKNFWGVRLFEEGHTAEDRRLKRTARRRISRRRNRLRYLQAFFEEAMTALDENFFARLQESFLVPEDKKWHRHPIFAKLEDEVAYHETYPTIYHLRKKLADSSEQADLRLIYLALAHIVKYRGHFLIEGKLSTENISVKDQFQQFMVIYNQTFVNGESRLVSAPLPESVLIEEELTEKASRTKKSEKVLQQFPQEKANGLFGQFLKLMVGNKADFKKVFGLEEEAKITYASESYEEDLEGILAKVGDEYSDVFLAAKNVYDAVELSTILADSDKKSHAKLSSSMIVRFTEHQEDLKNFKRFIRENCPDEYDNLFKNEQKDGYAGYIAHAGKVSQLKFYQYVKKIIQDIAGAEYFLEKIAQENFLRKQRTFDNGVIPHQIHLAELQAIIHRQAAYYPFLKENQKKIEQLVTFRIPYYVGPLSKGDASTFAWLKRQSEEPIRPWNLQETVDLDQSATAFIERMTNFDTYLPSEKVLPKHSLLYEKFMVFNELTKISYTDDRGIKANFSGKEKEKIFDYLFKTRRKVKKKDIIQFYRNEYNTEIVTLSGLEEDQFNASFSTYQDLLKCGLTRAELDHPDNAEKLEDIIKILTIFEDRQRIRTQLSTFKGQFSAEVLKKLERKHYTGWGRLSKKLINGIYDKESGKTILDYLIKDDGVSKHYNRNFMQLINDSQLSFKNAIQKAQSSEHEETLSETVNELAGSPAIKKGIYQSLKIVDELVAIMGYAPKRIVVEMARENQTTSTGKRRSIQRLKIVEKAMAEIGSNLLKEQPTTNEQLRDTRLFLYYMQNGKDMYTGDELSLHRLSHYDIDHIIPQSFMKDDSLDNLVLVGSTENRGKSDDVPSKEVVKKMKAYWEKLYAAGLISQRKFQRLTKGEQGGLTLEDKAHFIQRQLVETRQITKNVAGILDQRYNAKSKEKKVQIITLKASLTSQFRSIFGLYKVREVNDYHHGQDAYLNCVVATTLLKVYPNLAPEFVYGEYPKFQAFKENKAMAKAIIYTNLLRFFTEDEPRFTKDGEILWSNSYLKTIKKELNYHQMNIVKKVEVQKGGFSKESIKPKGPSNKLIPVKNGLDPQKYGGFDSPVVAYTVLFTHEKGKKPLIKQEILGITIMEKTRFEQNPILFLEEKGFLRPRVLMKLPKYTLYEFPEGRRRLLASAKEAQKGNQMVLPERLLTLLYHAKQCLLPNQSESLAYVEQHQPEFQEILERVVDFAEVHTLAKSKVQQIVKLFEANQTADVKEIAASFIQLMQFNAMGAPSTFKFFQKDIERARYTSIKEIFDATIIYQSTTGLYETRRKVVD

SEQ ID NO: 209 - protein, 1337 aa, Enterococcus faecalis
MKKDYVIGLDIGTNSVGWAVMTEDYQLVKKKMPIYGNTEKKKIKKNFWGVRLFEEGHTAEDRRLKRTARRRISRRRNRLRYLQAFFEEAMTALDENFFARLQESFLVPEDKKWHRHPIFAKLEDEVAYHETYPTIYHLRKKLADSSEQADLRLIYLALAHIVKYRGHFLIEGKLSTENISVKEQFQQFMIIYNQTFVNGESRLVSAPLPESVLIEEELTEKASRTKKSEKVLQQFPQEKANGLFGQFLKLMVGNKADFKKVFGLEEEAKITYASESYEEDLEGILAKVGDEYSDVFLAAKNVYDAVELSTILADSDKKSHAKLSSSMIVRFTEHQEDLKKFKRFIRENCPDEYDNLFKNEQKDGYAGYIAHAGKVSQLKFYQYVKKIIQDIAGAEYFLEKIAQENFLRKQRTFDNGVIPHQIHLAELQAIIHRQAAYYPFLKENQEKIEQLVTFRIPYYVGPLSKGDASTFAWLKRQNEKPIRPWNLQETVDLDQSATAFIERMTNFDTYLPSEKVLPKHSLLYEKFMVFNELTKISYTDDRGIKANFSGKEKEKIFDYLFKTRRKVKKKDIIQFYRNEYNTEIVTLSGLEEDQFNASFSTYQDLLKCGLTRAELDHPDNAEKLEDIIKILTIFEDRQRIRTQLSTFKGQFSAEVLKKLERKHYTGWGRLSKKLINGIYDKESGKTILDYLIKDDGVSKHYNRNFMQLINDSQLSFKNAIQKAQSSEHEETLSETVNELAGSPAIKKGIYQSLKIVDELVAIMGYAPKRIVVEMARENQTTSTGKRRSIQRLKIVEKAMAEIGSNLLKEQPTTNEQLRDTRLFLYYMQNGKDMYTGDELSLHRLSHYDIDHIIPQSFMKDDSLDNLVLVGSTENRGKSDDVPSKEVVKKMKAYWEKLYAAGLISQRKFQRLTKGEQGGLTLEDKAHFIQRQLVETRQITKNVAGILDQRYNAKSKEKKVQIITLKASLTSQFRSIFGLYKVREVNDYHHGQDAYLNCVVATTLLKVYPNLAPEFVYGEYPKFQAFKENKATAKAIIYTNLMRFFTEVEPRFTKDGEILWSNSYLKTIKKELNYHQMNIVKKVEVQKGGFSKESIKPKGPSNKLIPVKNGLDPQKYGGFDSPVVAYTVLFTHEKGKKPLIKQEILGITIMEKTKFEQNPILFLEEKGFLRPRVLMKLPKYTLYEFPEGRRRLLASAKEAQKGNQMVLPEHLLTLLYHAKQCLLPNQSESLAYVEQHQPEFQEILERVVDFAEVHTLAKSKVQQIVKLFETNQTADVKEIAASFIQLMQFNAMGAPSTFKFFQKDIERARYTSIKEIFDATIIYQSTTGLYETRRKVVD

SEQ ID NO: 210 - protein, 1337 aa, Enterococcus faecalis
MKKDYVIGLDIGTNSVGWAVMTEDYQLVKKKMPIYGNTEKKKIKKNFWGVRLFEEGHTAEDRRLKRTARRRISRRRNRLRYLQAFFEEAMTALDENFFARLQESFLVPEDKKWHRHPIFAKLEDEVAYHETYPTIYHLRKKLADSSEQADLRLIYLALAHIVKYRGHFLIEGKLSTENISVKEQFQQFMIIYNQTFVNGESRLVSAPLPESVLIEEELTEKASRTKKSEKVLQQFPQEKANGLFGQFLKLMVGNKADFKKVFGLEEEAKITYASESYEEDLEGILAKVGDEYSDVFLAAKNVYDAVELSTILADSDKKSHAKLSSSMIVRFTEHQEDLKNFKRFIRENCPDEYDNLFKNEQKDGYAGYIAHAGKVSQLKFYQYVKKIIQDIAGAEYFLEKIAQENFLRKQRTFDNGVIPHQIHLAELQAIIHRQAAYYPFLKENQKKIEQLVTFRIPYYVGPLSKGDASTFAWLKRQSEEPIRPWNLQETVDLDQSATAFIERMTNFDTYLPSEKVLPKHSLLYEKFMVFNELTKISYTDDRGIKANFSGKEKEKIFDYLFKTRRKVKKKDIIQFYRNEYNTEIVTLSGLEEDQFNASFSTYQDLLKCGLTRAELDHPDNAEKLEDIIKILTIFEDRQRIRTQLSTFKGQFSEEVLKKLERKHYTGWGRLSKKLINGIYDKESGKTILDYLIKDDGVSKHYNRNFMQLINDSQLSFKNAIQKAQSSEHEETLSETVNELAGSPAIKKGIYQSLKIVDELVAIMGYAPKRIVVEMARENQTTSTGKRRSIQRLKIVEKAMAEIGSNLLKEQPTTNEQLRDTRLFLYYMQNGKDMYTGDELSLHRLSHYDIDHIIPQSFMKDDSLDNLVLVGSTENRGKSDDVPSKEVVKKMKAYWEKLYAAGLISQRKFQRLTKGEQGGLTLEDKAHFIQRQLVETRQITKNVAGILDQRYNAKSKEKKVQIITLKASLTSQFRSIFGLYKVREVNDYHHGQDAYLNCVVATTLLKVYPNLAPEFVYGEYPKFQAFKENKATAKAIIYTNLLRFFTEDEPRFTKDGEILWSNSYLKTIKKELNYHQMNIVKKVEVQKGGFSKESIKPKGPSNKLIPVKNGLDPQKYGGFDSPVVAYTVLFTHEKGKKPLIKQEILGITIMEKTRFEQNPILFLEEKGFLRPRVLMKLPKYTLYEFPEGRRRLLASAKEAQKGNQMVLPEHLLTLLYHAKQCLLPNQSESLAYVEQHQPEFQEILERVVDFAEVHTLAKSKVQQIVKLFEANQTADVKEIAASFIQLMQFNAMGAPSTFKFFQKDIERARYTSIKEIFDATIIYQSTTGLYETRRKVVD

SEQ ID NO: 211 - protein, 1339 aa, Enterococcus faecium
MKKEYTIGLDIGTNSVGWSVLTDDYRLVSKKMKVAGNTEKSSTKKNFWGVRLFDEGQTAEARRSKRTARRRLARRRQRILELQKIFAPEILKIDEHFFARLNESFLVLDEKKQSRHPVFATIKQEKSYHQTYPTIYHLRQALADSSEKADIRLVYLAMAHLLKYRGHFLIEGELNTENSSVTETFRQFLSTYNQQFSEADDKQTEKLDEAVDCSFVFTEKMSKTKKAETLLKYFPHEKSNGYLSQFIKLMVGNQGNFKNVFGLEEAKLQFSKETYEEDLEELLEKIGDDYIDLFVQAKNVYDAVLLSEILSDSTKNTRAKLSAGMIRRYDAHKEDLVLLKRFVKENLPKKYRAFFGDNSVNGYAGYIEGHATQEDFYKFVKKELTGIRGSEVFLTKIEQENFLRKQRTFDNGVIPHQIHLTELRAIIANQKKHYPFLKEEQEKLESLLTFKIPYYVGPLAKKQENSPFAWLIRKSEEKIKPWNLPEIVDMEGSAVRFIERMINTDMYMPHNKVLPKNSLLYQKFSIYNELTKVRYQDERGQMNYFSSIEKKEIFHELFEKNRKVTKKDLQEFLYLKYDIKHAELSGIEKAFNASYTTYHDFLTMSENKREMKQWLEDPELASMFEEIIKTLTVFEDREMIKTRLSHHEATLGKHIIKKLTKKHYTGWGRLSKELIQGIRDKQSNKTILDYLINDDDFPHHRNRNFMQLINDDSLSFKKEIKKAQMITDTENLEEIVKELTGSPAIKKGILQSLKIVDEIVGIMGYEPANIVVEMARENQTTGRGLKSSRPRLKALEESLKDFGSQLLKEYPTDNSSLQKDRLYLYYLQNGRDMYTGAPLDIHRLSDYDIDHIIPRSFTTDNSIDNKVLVSSKENRLKKDDVPSEKVVKKMRSFWYDLYSSKLISKRKLDNLTKIKLTEEDKAGFIKRQLVETRQITKHVAGILHHRFNKAEDTNEPIRKVRIITLKSALVSQFRNRFGIYKVREINEYHHAHDAYLNGVVALALLKKYPQLAPEFVYGEYLKFNAHKANKATVKKEFYSNIMKFFESDTPVCDENGEIFWDKSKSIAQVKKVINHHHMNIVKKTEIQKGGFSKETVEPKKDSSKLLPRKNNWDPAKYGGLGSPNVAYTVAFTYEKGKARKRTNALEGITIMEREAFEQSPVLFLKNKGYEQAEIEMKLPKYALFELENGRKRMVASNKEAQKANSFLLPEHLVTLLYHAKQYDEISHKESFDYVNEHHKEFSEVFARVLEFAGKYTLAEKNIEKLEKIYKENQTDDLAKLASSFVNLMQFNAMGAPADFKFFDVTIPRKRYTSLTEIWQSTIIHQSITGLYETRIRMGK

SEQ ID NO: 212 - protein, 1340 aa, Enterococcus faecium
MKKEYTIGLDIGTNSVGWSVLTDDYRLVSKKMKVAGNTEKSSTKKNFWGVRLFDEGQTAEARRSKRTARRRLARRRQRILELQKIFAPEILKIDEHFFARLNESFLVPDEKKQSRHPVFATIKQEKSYHQTYPTIYHLRQALADSSEKADIRLVYLAMAHLLKYRGHFLIEGELNTENSSVTETFRQFLSTYNQQFSEAGDKQTEKLDEAVDCSFVFTEKMSKTKKAETLLKYFPHEKSNGYLSQFIKLMVGNQGNFKNVFGLEEEAKLQFSKETYEEDLEELLEKIGDDYIDLFVQAKNVYDAVLLSEILSDSTKNTRAKLSAGMIRRYDAHKEDLVLLKRFVKENLPKKYRAFFGDNSVNGYAGYIEGHATQEAFYKFVKKELTGIRGSEVFLTKIEQENFLRKQRTFDNGVIPHQIHLSELRAIIANQKKHYPFLKEEQEKLESLLTFKIPYYVGPLAKKQENSPFAWLIRKSEEKIKPWNLPEIVDMEGSAVRFIERMINTDMYMPHNKVLPKNSLLYQKFSIYNELTKVRYQDERGQMNYFSSIEKKEIFHELFEKNRKVTKKDLQEFLYLKYDIKHAELSGIEKAFNASYTTYHDFLTMSENKREMKQWLEDPELASMFEEIIKTLTVFEDREMIKTRLSHHEATLGKHIIKKLTKKHYTGWGRLSKELIQGIRDKQSNKTILDYLINDDDFPHHRNRNFMQLINDDSLSFKKEIKKAQMITDTENLEEIVKELTGSPAIKKGILQSLKIVDEIVGIMGYEPANIVVEMARENQTTGRGLKSSRPRLKALEESLKDFGSQLLKEYPTDNSSLQKDRLYLYYLQNGRDMYTGAPLDIHRLSDYDIDHIIPRSFTTDNSIDNKVLVSSKENRLKKDDVPSEKVVKKMRSFWYDLYSSKLISKRKLDNLTKIKLTEEDKAGFIKRQLVETRQITKHVAGILHHRFNKAEDTNDPIRKVRIITLKSALVSQFRNRFGIYKVREINEYHHAHDAYLNGVVALALLKKYPQLAPEFVYGEYLKFNAHKANKATVKKEFYSNIMKFFESDTPVCDENGEIFWDKSKSIAQVKKVINHHHMNIVKKTEIQKGGFSKETVEPKKDSSKLLPRKNNWDPAKYGGLGSPNVAYTVAFTYEKGKARKRTNALEGITIMEREAFEQSPVLFLKNKGYEQAEIEMKLPKYALFELENGRKRMVASNKEAQKANSFLLPEHLVTLLYHAKQYDEISHKESFDYVNEHHKEFSEVFARVLEFAGKYTLAEKNIEKLEKIYKENQTDDLAKLASSFVNLMQFNAMGAPADFKFFDVTIPRKRYTSLTEIWQSTIIHQSITGLYETRIRMGK

SEQ ID NO: 213 - protein, 1340 aa, Enterococcus faecium
MKKEYTIGLDIGTNSVGWSVLTDDYRLVSKKMKVAGNTEKSSTKKNFWGVRLFDEGQTAEARRSKRTARRRLARRRQRILELQKIFAPEILKIDEHFFARLNESFLVLDEKKQSRHPVFATIKQEKSYHQTYPTIYHLRQALADSSEKADIRLVYLAMAHLLKYRGHFLIEGELNTENSSVTETFRQFLSTYNQQFSEADDKQTEKLDEAVDCSFVFTEKMSKTKKAETLLKYFPHEKSNGYLSQFIKLMVGNQGNFKNVFGLEEEAKLQFSKETYEEDLEELLEKIGDDYIDLFVQAKNVYDAVLLSEILSDSTKNTRAKLSAGMIRRYDAHKEDLVLLKRFVKENLPKKYRAFFGDNSVNGYAGYIEGHATQEDFYKFVKKELTGIRGSEVFLTKIEQENFLRKQRTFDNGVIPHQIHLTELRAIIANQKKHYPFLKEEQEKLESLLTFKIPYYVGPLAKKQENSPFAWLIRKSEEKIKPWNLPEIVDMEGSAVRFIERMNNTDMYIPHNKVLPKNSLLYQKFSIYNELTKVRYQDERGQMNYFSSIEKKEIFHELFEKNRKVTKKDLQEFLYLKYDIKHAELSGIEKAFNASYTTYHDFLTMSENKREMKQWLEDPELASMFEEIIKTLTVFEDREMIKTRLSHHEATLGKHIIKKLTKKHYTGWGRLSKELIQGIRDKQSNKTILDYLINDDDFPHHRNRNFMQLINDDSLSFKKEIKKAQMITDTENLEEIVKELTGSPAIKKGILQSLKIVDEIVGIMGYEPANIVVEMARENQTTGRGLKSSRPRLKALEESLKDFGSQLLKEYPTDNSSLQKDRLYLYYLQNGRDMYTGAPLDIHRLSDYDIDHIIPRSFTTDNSIDNKVLVSSKENRLKKDDVPSEKVVKKMRSFWYDLYSSKLISKRKLDNLTKIKLTEEDKAGFIKRQLVETRQITKHVAGILHHRFNKAEDTNEPIRKVRIITLKSALVSQFRNRFGIYKVREINEYHHAHDAYLNGVVALALLKKYPQLAPEFVYGEYLKFNAHKANKATVKKEFYSNIMKFFESDTPVCDENGEIFWDKSKSIAQVKKVINHHHMNIVKKTEIQKGGFSKETVEPKKDSSKLLPRKNNWDPAKYGGLGSPNVAYTVAFTYEKGKARKRTNALEGITIMEREAFEQSPVLFLKNKGYEQAEIEMKLPKYALFELENGRKRMVASNKEAQKANSFLLPEHLVTLLYHAKQYDEISHKESFDYVNEHHKEFSEVFARVLEFAGKYTLAEKNIEKLEKIYKENQTDDLAKLASSFVNLMQFNAMGAPADFKFFDVTIPRKRYTSLTEIWQSTIIHQSITGLYETRIRMGK

SEQ ID NO: 214 - protein, 1340 aa, Enterococcus faecium
MKKEYTIGLDIGTNSVGWSVLTDDYRLVSKKMKVAGNTEKSSTKKNFWGVRLFDEGQTAEARRSKRTARRRLARRRQRILELQKIFAPEILKIDEHFFARLNESFLVLDEKKQSRHPVFATIKQEKSYHQTYPTIYHLRQALADSSEKADIRLVYLAMAHLLKYRGHFLIEGELNTENSSVTETFRQFLSTYNQQFSEADDKQTEKLDEAVDCSFVFTEKMSKTKKAETLLKYFPHEKSNGYLSQFIKLMVGNQGNFKNVFGLEEEAKLQFSKETYEEDLEELLEKIGDDYIDLFVQAKNVYDAVLLSEILSDSTKNTRAKLSAGMIRRYDAHKEDLVLLKRFVKENLPKKYRAFFGDNSVNGYAGYIEGHATQEDFYKFVKKELTGIRGSEVFLTKIEQENFLRKQRTFDNGVIPHQIHLTELRAIIANQKKHYPFLKEEQEKLESLLTFKIPYYVGPLAKKQENSPFAWLIRKSEEKIKPWNLPEIVDMEGSAVRFIERMINTDMYIPHNKVLPKNSLLYQKFSIYNELTKVRYQDERGQMNYFSSIEKKEIFHELFEKNRKVTKKDLQEFLYLKYDIKHAELSGIEKAFNASYTTYHDFLTMSENKREMKQWLEDPELASMFEEIIKTLTVFEDREMIKTRLSHHEATLGKHIIKKLTKKHYTGWGRLSKELIQGIRDKQSNKTILDYLINDDDFPHHRNRNFMQLINDDSLSFKKEIKKAQMITDTENLEEIVKELTGSPAIKKGILQSLKIVDEIVGIMGYEPANIVVEMARENQTTGRGLKSSRPRLKALEESLKDFGSQLLKEYPTDNSSLQKDRLYLYYLQNGRDMYTGAPLDIHRLSDYDIDHIIPRSFTTDNSIDNKVLVSSKENRLKKDDVPSEKVVKKMRSFWYDLYSSKLISKRKLDNLTKIKLTEEDKAGFIKRQLVETRQITKHVAGILHHRFNKAEDTNEPIRKVRIITLKSALVSQFRNRFGIYKVREINEYHHAHDAYLNGVVALALLKKYPQLAPEFVYGEYLKFNAHKANKATVKKEFYSNIMKFFESDTPVCDENGEIFWDKSKSIAQVKKVINHHHMNIVKKTEIQKGGFSKETVEPKKDSSKLLPRKNNWDPAKYGGLGSPNVAYTVAFTYEKGKARKRTNALEGITIMEREAFEQSPVLFLKNKGYEQAEIEMKLPKYALFELENGRKRMVASNKEAQKANSFLLPEHLVTLLYHAKQYDEISHKESFDYVNEHHKEFSEVFARVLEFAGKYTLAEKNIEKLEKIYKENQTDDLAKLASSFVNLMQFNAMGAPADFKFFDVTIPRKRYTSLTEIWQSTIIHQSITGLYETRIRMGK

SEQ ID NO: 215 - protein, 1339 aa, Enterococcus faecium
MKKEYTIGLDIGTNSVGWSVLTDDYRLVSKKMKVAGNTEKSSTKKNFWGVRLFDEGQTAEARRSKRTARRRLARRRQRILELQKIFAPEILKIDEHFFARLNESFLVLDEKKQSRHPVFATIKQEKSYHQTYPTIYHLRQALADSSEKADIRLVYLAMAHLLKYRGHFLIEGELNTENSSVTETFRQFLSTYNQQFSEADDKQTEKLDEAVDCSFVFTEKMSKTKKAETLLKYFPHEKSNGYLSQFIKLMVGNQGNFKNVFGLEEAKLQFSKETYEEDLEELLEKIGDDYIDLFVQAKNVYDAVLLSEILSDSTKNTRAKLSAGMIRRYDAHKEDLVLLKRFVKENLPKKYRAFFGDNSVNGYAGYIEGHATQEDFYKFVKKELTGIRGSEVFLTKIEQENFLRKQRTFDNGVIPHQIHLTELRAIIANQKKHYPFLKEEQEKLESLLTFKIPYYVGPLAKKQENSPFAWLIRKSEEKIKPWNLPEIVDMEGSAVRFIERMINTDMYIPHNKVLPKNSLLYQKFSIYNELTKVRYQDERGQMNYFSSIEKKEIFHELFEKNRKVTKKDLQEFLYLKYDIKHAELSGIEKAFNASYTTYHDFLTMSENKREMKQWLEDPELASMFEEIIKTLTVFEDREMIKTRLSHHEATLGKHIIKKLTKKHYTGWGRLSKELIQGIRDKQSNKTILDYLINDDDFPHHRNRNFMQLINDDSLSFKKEIKKAQMITDTENLEEIVKELTGSPAIKKGILQSLKIVDEIVGIMGYEPANIVVEMARENQTTGRGLKSSRPRLKALEESLKDFGSQLLKEYPTDNSSLQKDRLYLYYLQNGRDMYTGAPLDIHRLSDYDIDHIIPRSFTTDNSIDNKVLVSSKENRLKKDDVPSEKVVKKMRSFWYDLYSSKLISKRKLDNLTKIKLTEEDKAGFIKRQLVETRQITKHVAGILHHRFNKAEDTNEPIRKVRIITLKSALVSQFRNRFGIYKVREINEYHHAHDAYLNGVVALALLKKYPQLAPEFVYGEYLKFNAHKANKATVKKEFYSNIMKFFESDTPVCDENGEIFWDKSKSIAQVKKVINHHHMNIVKKTEIQKGGFSEETVEPKKDSSKLLPRKNNWDPAKYGGLGSPNVAYTVAFTYEKGKARKRTNALEGITIMEREAFEQSPVLFLKNKGYEQAEIEMKLPKYALFELENGRKRMVASNKEAQKANSFLLPEHLVTLLYHAKQYDEISHKESFDYVNEHHKEFSEVFARVLEFAGKYTLAEKNIEKLEKIYKENQTDDLAKLASSFVNLMQFNAMGAPADFKFFDVTIPRKRYTSLTEIWQSTIIHQSITGLYETRIRMGK

SEQ ID NO: 216 - protein, 1340 aa, Enterococcus faecium
MKKEYTIGLDIGTNSVGWSVLTDDYRLVSKKMKVAGNTEKSSTKKNFWGVRLFDEGQTAEARRSKRTARRRLARRRQRILELQKIFAPEILKIDEHFFARLNESFLVLDEKKQSRHPVFATIKQEKSYHQTYPTIYHLRQALADSSEKADIRLVYLAMAHLLKYRGHFLIEGELNTENSSVTETFRQFLSTYNQQFSEADDKQTEKLDEAVDCSFVFTEKMSKTKKAETLLKYFPHEKSNGYLSQFIKLMVGNQGNFKNVFGLEEEAKLQFSKETYEEDLEELLEKIGDDYIDLFVQAKNVYDAVLLSEILSDSTKNTRAKLSAGMIRRYDAHKEDLVLLKRFVKENLPKKYRAFFGDNSVNGYAGYIEGHATQEDFYKFVKKELTGIRGSEVFLTKIEQENFLRKQRTFDNGVIPHQIHLTELRAIIANQKKHYPFLKEEQEKLESLLTFKIPYYVGPLAKKQENSPFAWLIRKSEEKIKPWNLPEIVDMEGSAVRFIERMINTDMYMPHNKVLPKNSLLYQKFSIYNELTKVRYQDERGQMNYFSSIEKKEIFHELFEKNRKVTKKDLQEFLYLKYDIKHAELSGIEKAFNASYTTYHDFLTMSENKREMKQWLEDPELASMFEEIIKTLTVFEDREMIKTRLSHHEATLGKHIIKKLTKKHYTGWGRLSKELIQGIRDKQSNKTILDYLINDDDFPHHRNRNFMQLINDDSLSFKKEIKKAQMITDTENLEEIVKELTGSPAIKKGILQSLKIVDEIVGIMGYEPANIVVEMARENQTTGRGLKSSRPRLKALEESLKDFGSQLLKEYPTDNSSLQKDRLYLYYLQNGRDMYTGAPLDIHRLSDYDIDHIIPRSFTTDNSIDNKVLVSSKENRLKKDDVPSEKVVKKMRSFWYDLYSSKLISKRKLDNLTKIKLTEEDKAGFIKRQLVETRQITKHVAGILHHRFNKAEDTNEPIRKVRIITLKSALVSQFRNRFGIYKVREINEYHHAHDAYLNGVVALALLKKYPQLAPEFVYGEYLKFNAHKANKATVKKEFYSNIMKFFESDTPVCDENGEIFWDKSKSIAQVKKVINHHHMNIVKKTEIQKGGFSKETVEPKKDSSKLLPRKNNWDPAKYGGLGSPNVAYTVAFTYEKGKARKRTNALEGITIMEREAFEQSPVLFLKNKGYEQAEIEMKLPKYALFELENGRKRMVASNKEAQKANSFLLPEHLVTLLYHAKQYDEISHKESFDYVNEHHKEFSEVFARVLEFAGKYTLAEKNIEKLEKIYKENQTDDLAKLASSFVNLMQFNAMGAPADFKFFDVTIPRKRYTSLTEIWQSTIIHQSITGLYETRIRMGK

SEQ ID NO: 217 - protein, 1340 aa, Enterococcus faecium
MKKEYTIGLDIGTNSVGWSVLTDDYRLVSKKMKVAGNTEKSSTKKNFWGVRLFDEGQTAEARRSKRTARRRLARRRQRILELQKIFAPEILKIDEHFFARLNESFLVLDEKKQSRHPVFATIKQEKSYHQTYPTIYHLRQALADSSEKADIRLVYLAMAHLLKYRGHFLIEGELNTENSSVTETFRQFLSTYNQQFSEADDKQTEKLDEAVDCSFVFTEKMSKTKKAETLLKYFPHEKSNGYLSQFIKLMVGNQGNFKNVFGLEEEAKLQFSKETYEEDLEELLEKIGDDYIDLFVQAKNVYDAVLLSEILSDSTKNTRAKLSAGMIRRYDAHKEDLVLLKRFVKENLPKKYRAFFGDNSVNGYAGYIEGHATQEDFYKFVKKELTGIRGSEVFLTKIEQENFLRKQRTFDNGVIPHQIHLTELRAIIANQKKHYPFLKEEQEKLESLLTFKIPYYVGPLAKKQENSPFAWLIRKSEEKIKPWNLPEIVDMEGSAVRFIERMINTDMYIPHNKVLPKNSLLYQKFSIYNELTKVRYQDERGQMNYFSSIEKKEIFHELFEKNRKVTKKDLQEFLYLKYDIKHAELSGIEKAFNASYTTYHDFLTMSENKREMKQWLEDPELASMFEEIIKTLTVFEDREMIKTRLSHHEATLGKHIIKKLTKKHYTGWGRLSKELIQGIRDKQSNKTILDYLINDDDFPHHRNRNCMQLINDDSLSFKKEIKKAQMITDTENLEEIVKELTGSPAIKKGILQSLKIVDEIVGIMGYEPANIVVEMARENQTTGRGLKSSRPRLKALEESLKDFGSQLLKEYPTDNSSLQKDRLYLYYLQNGRDMYTGAPLDIHRLSDYDIDHIIPRSFTTDNSIDNKVLVSSKENRLKKDDVPSEKVVKKMRSFWYDLYSSKLISKRKLDNLTKIKLTEEDKAGFIKRQLVETRQITKHVAGILHHRFNKAEDTNEPIRKVRIITLKSALVSQFRNRFGIYKVREINEYHHAHDAYLNGVVALALLKKYPQLAPEFVYGEYLKFNAHKANKATVKKEFYSNIMKFFESDTPVCDENGEIFWDKSKSIAQVKKVINHHHMNIVKKTEIQKGGFSKETVEPKKDSSKLLPRKNNWDPTKYGGLGSPNVAYTVAFTYEKGKARKRTNALEGITIMEREAFEQSPVLFLKNKGYEQAEIEMKLPKYALFELENGRKRMVASNKEAQKANSFLLPEHLVTLLYHAKQYDEISHKESFDYVNEHHKEFSEVFARVLEFAGKYTLAEKNIEKLEKIYKENQTDDLAKLASSFVNLMQFNAMGAPADFKFFDVTIPRKRYTSLTEIWQSTIIHQSITGLYETRIRMGK

SEQ ID NO: 218 - protein, 1336 aa, Enterococcus faecium
MTKDYTIGLDIGTNSVGWAVLTDDYQLMKRKMSVHGNTEKKKIKKNFWGARLFDEGQTAEFRRTKRTNRRRLARRKYRLSKLQDLFAEELCKQDDCFFVRLEESFLVPEEKQYKPASIFPTLEEEKEYYQKYPTIYHLRQKLVDSTEKEDLRLVYLALAHLLKYRGHFLFEGDLDTENTSIEESFRVFLEQYSKQSDQPLIVHQPVLTILTDKLSKTKKVEEILKYYPTEKINSFFAQCLKLIVGNQANFKRIFDLEAEVKLQFSKETYEEDLESLLEKIGDEYLDIFLQAKKVHDAILLSEIISSTVKHTKAKLSSGMVERYERHKADLAKFKQFVKENVPQKATVFFKDTTKNGYAGYIKGKTTQEEFYKFVKKELSGVVGSEPFLEKIDQETFLLKQRTYTNGVIPHQVHLIELKAIIDQQKQHYPFLEEAGPKIIALFKFRIPYYVGPLAKEQEASSFAWIERKTAEKINPWNFSEVVDIEKSAMRFIQRMTKQDTYLPTEKVLPKNSLLYQKYMIFNELTKVSYKDERGVKQYFSGDEKQQIFKQLFQKERGKITVKKLQNFLYTHYHIENAQIFGIEKAFNASYSTYHDFMKLAKTNQKAMQEWLEQPEMEPIFEDIVKILTIFEDRQMIKHQLSKYQEVFGEKLLKEFARKHYTGWGRFSAKLIHGIRDRKTNKTILDYLINDDDVPANRNRNLMQLINDEHLSFKEEIAKATVFSKHKSLVDVIQDLPGSPAIKKGIWQSLKIVEELIAIIGYKPKNIVIEMARENQKTHRTSPRLKALENGLKQIGSTLLKEQPTDNKALQKERLYLYYLQNGRDMYTGEPLEIENLHQYEVDHIIPRSFIVDNSIDDKVLVASKQNQKKRDDVPKKQIVNEQRIFWNQLKEAKLISTKKYAYLTKIELTPEDKARFIQRQLVETRQITKHVANILHQSFNQEEEGTDCDGVQIITLKATLTSQFRQTFGLYKVREINPHHHAHDAYLNGFIANVLLKRYPKLAPEFVYGKYVKYSLARENKATAKKEFYSNILKFLESDEPFCDENGEIYWEKSHHLPRIKKVLSSHQVNVVKKVEQQKGGFYKETVNSKEKPDKLIERKNNWDVTKYGGFGSPVIAYAIAFVYAKGKTQKKTRAIEGITIMEQAAFEKDPTTFLKEKGFPQVTEFIKLPKYTLFEFDNGRRRFLASHKESQKGNPFILSDQLVTLLYHAQHYDKITYQESFDYVNTHLSDFSAILTEVLAFAEKYTLADKNIERIQELYEENKYGETSMIAQSFLQLLQFNAIGAPADFKFFGVTIPRKRYTSLTEIWDATIIYQSVTGLYETRIRMGDLWAGEQ

SEQ ID NO: 219 - protein, 1340 aa, Enterococcus faecium
MKKEYTIGLDIGTNSVGWSVLTDDYRLVSKKMKVAGNTEKSSTKKNFWGVRLFDEGQTAEARRSKRTARRRLARRRQRILELQKIFAPEILKIDEHFFARLNESFLVLDEKKQSRHPVFATIKQEKSYHQTYPTIYHLRQALADSSEKADIRLVYLAMAHLLKYRGHFLIEGELNTENSSVTETFRQFLSTYNQQFSEADDKQTEKLDEAVDCSFVFTEKMSKTKKAETLLKYFPHEKSNGYLSQFIKLMVGNQGNFKNVFGLEEEAKLQFSKETYEEDLEELLEKIGDDYIDLFVQAKNVYDAVLLSEILSDSTKNTRAKLSAGMIRRYDAHKEDLVLLKRFVKENLPKKYRAFFGDNSVNGYAGYIEGHATQEDFYKFVKKELTGIRGSEVFLTKIEQENFLRKQRTFDNGVIPHQIHLTELRAIIANQKKHYPFLKEEQEKLESLLTFKIPYYVGPLAKKQENSPFAWLIRKSEEKIKPWNLPEIVDMEGSAVRFIERMINTDMYMPHNKVLPKNSLLYQKFSIYNELTKVRYQDERGQMNYFSSIEKKEIFHELFEKNRKVTKKDLQEFLYLKYDIKHAELSGIEKAFNASYTTYHDFLTMSENKREMEQWLEDPELASMFEEIIKTLTVFEDREMIKTRLSHHEATLGKHIIKKLTKKHYTGWGRLSKELIQGIRDKQSNKTILDYLINDDDFPHHRNRNFMQLINDDSLSFKKEIKKAQMITDTENLEEIVKELTGSPAIKKGILQSLKIVDEIVGIMGYEPANIVVEMARENQTTGRGLKSSRPRLKALEESLKDFGSQLLKEYPTDNSSLQKDRLYLYYLQNGRDMYTGAPLDIHRLSDYDIDHIIPRSFTTDNSIDNKVLVSSKENRLKKDDVPSEKVVKKMRSFWYDLYSSKLISKRKLDNLTKIKLTEEDKAGFIKRQLVETRQITKHVAGILHHRFNKAEDTNEPIRKVRIITLKSALVSQFRNRFGIYKVREINEYHHAHDAYLNGVIALALLKKYPQLAPEFVYGEYLKFNAHKANKATVKKEFYSNIMKFFESDTPVCDENGEIFWDKSKSIAQVKKVINHHHMNIVKKTEIQKGGFSKETVEPKKDSSKLLPRKNNWDPAKYGGLGSPNVAYTVAFTYEKGKARKRTNALEGITIMEREAFEQSPVLFLKNKGYEQAEIEMKLPKYALFELENGRKRMVASNKEAQKANSFLLPEHLVTLLYHAKQYDEISHKESFDYVNEHHKEFSEVFARVLEFAGKYTLAEKNIEKLEKIYKENQTDDLAKLASSFVNLMQFNAMGAPADFKFFDVTIPRKRYTSLTEIWQSTIIHQSITGLYETRIRMGK

SEQ ID NO: 220 - protein, 1336 aa, Enterococcus hirae
MTKDYTIGLDIGTNSVGWAVLTDDYQLMKRKMSVHGNTEKKKIKKNFWGARLFDEGQTAEFRRTKRTNRRRLARRKYRLSKLQDLFAEELCKQDDCFFVRLEESFLVPEEKQYKPASIFPTLEEEKEYYQKYPTIYHLRQKLVDSTEKGDLRLVYLALAHLLKYRGHFLFEGDLDTENTSIEESFRVFLEQYGKQSDQPLIVHQPVLTILTDKLSKTKKVEEILKYYPTEKINSFFAQCLKLIVGNQANFKRIFDLEAEVKLQFSKETYEEDLESLLEKIGDEYLDIFLQAKKVHDAILLSEIISSTVKHTQAKLSSGMVERYERHKADLAKFKQFVKENVPQKATVFFKDTTKNGYAGYIKGKTTQEEFYKFVKKELSGVVGSEPFLEKIDQETFLLKQRTYTNGVIPHQVHLIELKAIIDQQKQHYPFLEEAGPKIIALFKFRIPYYVGPLAKEQEASSFAWIERKTAEKINPWNFSEVVDIEKSAMRFIQRMTKQDTYLPTEKVLPKNSLFYQKYMIFNELTKVSYKDERGVKQYFSGDEKQQIFKQLFQKERGKITVKKLQNFLYTHYHIENAQIFGIEKAFNASYSTYHDFMKLAKTNQKAMQEWLEQPEMEPIFEDIVKILTIFEDRQMIKHQLSKYQEVFGEKLLKEFARKHYTGWGRFSAKLIHGIRDRKTNKTILDYLINDDDVPANRNRNLMQLINDEHLSFKEEIAKATVFSKHKSLVDVIQDLPGSPAIKKGIWQSLKIVEELIAIIGYKPKNIVIEMARENQKTHRTKPRLKALENGLKQIGSTLLKEQPTDNKALQKERLYLYYLQNGRDMYTGEPLEIENLHQYEVDHIIPRSFIVDNSIDNKVLVASKQNQKKRDDVPKKQIVNEQRIFWNQLKEAKLISPKKYAYLTKIELTPEDKARFIQRQLVETRQITKHVANILHQSFNQEEEGTDCDGVQIITLKATLTSQFRQTFGLYKVREINPHHHAHDAYLNGFIANVLLKRYPKLAPEFVYGKYVKYSLARENKATAKKEFYSNILKFLESDEPFCDENGEIYWEKSHHLPRIKKVLSSHQVNVVKKVEQQKGGFYKETVNSKEKPDKLIERKNNWDVTKYGGFGSPVIAYAIAFVYAKGKTQKKTKAIEGITIMEQAAFEKDPTTFLKDKGFPQVTEFIKLPKYTLFEFDNGRRRFLASHKESQKGNPFILSDQLVTLLYHAQHYDKITYQESFDYVNTHLSDFSAILTEVLAFAEKYTLADKNIERIQELYEENKYGEISMIAQSFLQLLQFNAIGAPADFKFFGVTIPRKRYTSLTEIWDATIIYQSVTGLYETRIRMGDLWAGEQ

SEQ ID NO: 221 - protein, 1336 aa, Enterococcus hirae
MTKDYTIGLDIGTNSVGWAVLTDDYQLMKRKMSVHGNTEKKKIKKNFWGARLFDEGQTAEFRRTKRTNRRRLARRKYRLSKLQDLFAEELCKQDDCFFVRLEESFLVPEEKQYKPASIFPTLEEEKEYYQKYPTIYHLRQKLVDSTEKEDLRLVYLALAHLLKYRGHFLFEGDLDTENTSIEESFRVFLEQYSKQSDQPLIVHQPVLTILTDKLSKTKKVEEILKYYPTEKINSFFAQCLKLIVGNQANFKRIFDLEAEVKLQFSKETYEEDLESLLEKIGDEYLDIFLQAKKVHDAILLSEIISSTVKHTKAKLSSGMVERYERHKADLAKFKQFVKENVPQKATVFFKDTTKNGYAGYIKGKTTQEEFYKFVKKELSGVVGSEPFLEKIDQETFLLKQRTYTNGVIPHQVHLIELKAIIDQQKQHYPFLEEAGPKIIALFKFRIPYYVGPLAKEQEASSFAWIERKTAEKINPWNFSEVVDIEKSAMRFIQRMTKQDTYLPTEKVLPKNSLLYQKYMIFNELTKVSYKDERGVKQYFSGDEKQQIFKQLFQKERGKITVKKLQNFLYTHYHIENAQIFGIEKAFNASYSTYHDFMKLAKTNQKAMQEWLEQPEMEPIFEDIVKILTIFEDRQMIKHQLSKYQEVFGEKLLKEFARKHYTGWGRFSAKLIHGIRDRKTNKTILDYLINDDDVPANRNRNLMQLINDEHLSFKEEIAKATVFSKHKSLVDVIQDLPGSPAIKKGIWQSLKIVEELIAIIGYKPKNIVIEMARENQKTHRTSPRLKALENGLKQIGSTLLKEQPTDNKALQKERLYLYYLQNGRDMYTGEPLEIENLHQYEVDHIIPRSFIVDNSIDNKVLVASKQNQKKRDDVPKKQIVNEQRIFWNQLKEAKLISPKKYAYLTKIELTPEDKARFIQRQLVETRQITKHVANILHQSFNQEEEGTDCDGVQIITLKATLTSQFRQTFGLYKVREINPHHHAHDAYLNGFIANVLLKRYPKLAPEFVYGKYVKYSLARENKATAKKEFYSNILKFLESDEPFCDENGEIYWEKSHHLPRIKKVLSSHQVNVVKKVEQQKGGFYKETVNSKEKPDKLIERKNNWDVTKYGGFGSPVIAYAIAFVYAKGKTQKKTRAIEGITIMEQAAFEKDPTTFLKEKGFPQVTEFIKLPKYTLFEFDNGRRRFLASHKESQKGNPFILSDQLVTLLYHAQHYDKITYQESFDYVNTHLSDFSAILTEVLAFAEKYTLADKNIERIQELYEENKYGETSMIAQSFLQLLQFNAIGAPADFKFFGVTIPRKRYTSLTEIWDATIIYQSVTGLYETRIRMGDLWAGEQ

SEQ ID NO: 222 - protein, 1336 aa, Enterococcus hirae
MTKDYTIGLDIGTNSVGWAVLTDDYQLMKRKMSVHGNTEKKKIKKNFWGARLFDEGQTAEFRRTKRTNRRRLARRKYRLSKLQDLFAEELCKQDDCFFVRLEESFLVPEEKQYKPASIFPTLEEEKEYYQKYPTIYHLRQKLVDSTEKEDLRLVYLALAHLLKYRGHFLFEGDLDTENTSIEESFRVFLEQYGKQSDQPLIVHQPVLTILTDKLSKTKKVEEILKYYPTEKINSFFAQCLKLIVGNQANFKRIFDLEAEVKLQFSKETYEEDLESLLEKIGDEYLDIFLQAKKVHDAILLSEIISSTVKHTQAKLSSGMVERYERHKADLAKFKQFVKENVPQKATVFFKDTTKNGYAGYIKGKTTQEEFYKFVKKELSGVVGSEPFLEKIDQETFLLKQRTYTNGVIPHQVHLIELKAIIDQQKQHYPFLEEAGPKIIALFKFRIPYYVGPLAKEQEASSFAWIERKTAEKINPWNFSEVVDIEKSAMRFIQRMTKQDTYLPTEKVLPKNSLLYQKYMIFNELTKVSYKDERGVKQYFSGDEKQQIFKQLFQKERGKITVKKLQNFLYTHYHIENAQIFGIEKAFNASYSTYHDFMKLAKTNQKAMQEWLEQPEMEPIFEDIVKILTIFEDRQMIKHQLSKYQEVFGEKLLKEFARKHYTGWGRFSAKLIHGIRDRKTNKTILDYLINDDDVPANRNRNLMQLINDEHLSFKEEIAKATVFSKHKSLVDVIQDLPGSPAIKKGIWQSLKIVEELIAIIGYKPKNIVIEMARENQKTHRTKPRLKALENGLKQIGSTLLKEQPTDNKALQKERLYLYYLQNGRDMYTGEPLEIENLHQYEVDHIIPRSFIVDNSIDNKVLVASKQNQKKRDDVPNKQIVNEQRIFWNQLKEAKLISPKKYAYLTKIELTPEDKARFIQRQLVETRQITKHVANILHQSFNQEEEGTDCDGVQIITLKATLTSQFRQTFGLYKVREINPHHHAHDAYLNGFIANVLLKRYPKLAPEFVYGKYVKYSLARENKATAKKEFYSNILKFLESDEPFCDENGEIYWEKSHHLPRIKKVLSSHQVNVVKKVEQQKGGFYKETVNSKEKPDKLIERKNNWDVTKYGGFGSPVIAYAIAFVYAKGKTQKKTRAIEGITIMEQAAFEKDPTTFLKDKGFPHVTEFIKLPKYTLFEFDNGRRRFLASHKESQKGNPFILSDQLVTLLYHAQHYDKITYQESFDYVNTHLSDFSAILTEVLAFAEKYTLADKNIERIQELYEENKYGEISMIAQSFLQLLQFNAIGAPADFKFFGVTIPRKRYTSLTEIWDATIIYQSVTGLYETRIRMGDLWAGEQ

SEQ ID NO: 223 - protein, 1330 aa, Enterococcus italicus
MKNDYTIGLDIGTNSVGYSVVTDDYKVISKKMNVFGNTEKKSIKKNFWGVRLFESGQTAQEARMKRTSRRRIARRKNRICYLQEIFQPEMNHLDNNFFYRLNESFLVADDAKYDKHPIFGTLDEEIHFHEQFPTIYHLRKYLADGDEKADLRLVYLAIAHIIKFRGNFLIEGELNTENNSVIELSKVFVQLYNQTLSELEGFQFIDESIDFSEVLTQQLSKSERADNVLKLFPDEKGTGIFAQFIKLIVGNQGNFKKVFQLEEDQKLQLSTDDYEENIENLLAIIGDEYGDIFVAAQNLYQAILLAGILTSTEKTRAKLSASMIQRYEEHAKDLKLLKRFVKEHIPDKYAEIFNDATKNGYAGYIDGKTKEEEFYKYLKTTLVQKSGYQYFIEKIEQENFLRKQRIYDNGVIPHQVHAEELRAILRKQEKYYSFLKENHEKIEQIFKVRIPYYVGPLAKHNEQSRFAWNIRKSDEPIRPWNMNDVVDENASAVAFIERMTIKDIYLNENVLPRHSLIYEKFTVFNELTKVLYADDRGVFQRFSAEEKEDIFEKLFKSERKVTKKKLENYLRIELSISSPSVKGIEEQFNANFGTYLDLKKFDELHPYLDDEKYQDTLEEVIKVLTVFEDRSMIQNQLEQLPLNLSTKTIKALSRRKYTGWGRLSARLIDGIHDKNSGKTILDYLIEDESDSYIVNRNFMQLINDDHLSFKKIIEDSQPYKEQQSAEEIVSELSGSPAIKKGILQSLKIVDELVAIMGYKPKNIVVEMARENQTTGRGKQNSKPRLKGIENGLKEFSDSVLKGSSIDNKQLQNDRLYLYYLQNGKDMYTGHELDIDHLSTYDIDHIIPQSFLTDNSIDNRVLTTSKSNRGKSDNVPSEEVVRKMDRFWRKLLNAKLISERKYTNLTKKELTESDKAGFLKRQLVETRQITKHVATILDSKFNEDSNNRDVQIITLKSALVSEFRKTFNLYKVREINDLHHAHDAYLNAVVALSLLRVYPQLKPEFVYGEYGKNSIHDQNKATIKKQFYSNITRYFASKDYIINDDGEILWNKQETIAQVIKTLGMHQVNVVKKVEIQKGGFSKESIQPKGESQKLIRRKQQWNTKKYGGFDSPVVAYAILLSFDKGKRKARSFKIVGITIQDRESFEGNPILYLSKKDYHNPKVEAILPKYSLFEFENGRRRMVASASETQKGNQLIIPGHLMELLYHSKKIINGKNSDSVSYIQNNKEKFREIFEYIVDFSSKYISADANLNKIEKIFENNFHKASEQEIAKSFINLLTFTAMGAPADFEFFGEKIPRKRYVSISEIIDAVFIHQSITGLYETRVRLTEV

SEQ ID NO: 224 - protein, 1330 aa, Enterococcus mundtii
MEKEYTIGLDIGTNSVGWAVLTDDYRLVARKMSIQGDSNRKKIKKNFWGARLFEEGKTAQFRRIKRTNRRRIARRRQRVLALQDIFAEEIHKKDPNFFARLEEGDRVEADKRFAKFPVFATLSEEKNYHRQYPTIYHLRHDLANSKEQADIRLVYLAIAHCLKYRGHFLFEGELDTENTSVTENYQQFLQAYQQFFPEPIGDLDDAVPILTERLSKAKRVEKVLAYYPSEKSTGNFAQFLKLMVGNQANFKKTFDLEEEMKLNFTRDCYEEDLNELLEKTSDDYAELFLKAKGVYDAILLSQILSKSDDETKAKLSANMKLRFEEHQRDLKQLKELVRRDLPKKYDDFFKNRSKNGYAGYVKGKATQEDFYKFLRTELAGLEESQSIMEKIDLEIYLLKQRTFANGVIPHQIHLVEMREIMDRQKRFYPFLKGAQGKIEKLLTFRIPYYVGPLAQEGQSPFAWIKRKSPSQITPWNFAEVVDKENSAIEFIERMTNQDTYLPKEKVLPKQSLIYQRFMIFNELTKVSYTDERGKSHYFSSEQKRKIFNELFKQHPRVTEKQLRKFLELNEQIDSTEIKGIETSFNASYSTYHDLLKLSDQMDTLLDDPDMTTMFEEIIKILTIFEDREMIREQLKPYETVLGLPAIKKLAKKHYTGWGRLSEKMIQGMREKQSRKTILDYLIDDDDFPCNRNRNFMQLINDDHLSFKETIANELIMSDSNVLLDQVKAIPGSPAVKKGIWQSIKIVEEIIGIIGKAPKNIVIEMARENQRTSRSRPRLKALEEALKNIDSPLLKDYPTDNQALQKDRLYLYYLQNGKDMYTGEPLEIHRLSEYDIDHIIPRSFIVDNSLDNKVLVSSKVNRGKLDNAPDPLVVKRMRSHWEKLHQAKLISDKKLANLTKQNLTEADKARFIQRQLVETRQITKHVANLLHQHFNLPEEVSATEKTSIITLKSTLTSQFRQMFDIYKVREINHHHHAHDAYLNGVVAMTLLKKYPKLAPEFVYGSYIKGDINQINKATAKKEFYSNIMKFFESEEIICDEQGEVIWNKKRDLSTIKKTIGAHQVNIVKKVEKQKGGFYKETINSKANPEKLIPRKASLDPLKYGGYGSPLVAYTVIFIFEKGKQKKVTKGIEGITVMEQLRFEQDPREFLKTKGYEGVKQWLILPKYILFEAQGGYRRMIASHQETQKANSLILPENLVTLLYHARHYDEINHKVSFDYVNAHKEGFNDIFDFISDFGVRYILAPQHLEKIKVAYEKNKEVDLKEMIDAILSLLKFTLFGASVEFKFFDIKILKRYKSLTDIWEATIIYQSVTGLYERRVEVRKLWDGERL

SEQ ID NO: 225 - protein, 1334 aa, Enterococcus phoeniculicola
MKKEYTIGLDIGTNSVGWAVLTENYDLVKKKMKVYGNTETKYLKKNLWGVRLFDEGETAADRRLKRTTRRRYSRRRNRICRLQDLFTEEMNQVDANFFHRLQESFLVPDEKEFERHAIFGKMEEEVSYYREFPTIYHLRKHLADTSEQADLRLVYLALAHIVKYRGHFLIEGELNTENSSVSETFRTFIQVYNQIFRENEVPLAVPDNIEELFSEKVSRARKVEAILSVYSEEKSTGTLAQFLKLMVGNQGRFKKTFDLEEDGIIQIPKEEYEEELETLLAIIGDEYAEIFSATKSVYDAVALSGILSVTDGDTKAKLSASMVERYEAHQKDLVQFKQFIRKELPEMYAPIFRDNSVSGYAGYVENSKVVTQAEFYKYIKKAIEKVPGAEYFLEKIEQETFLDKQRTFNNGVIPHQIHLEELEAIIQKQATYYPFLADNKEEMKQLVTFRIPYYVGPLADGNSPFAWLERISSEPIRPGNLAEVVDIKKSATKFIERMTNFDTYLPTEKVLPKHSMIYEKYMVYNELTKVSYVDERGMNQRFSGEEKKQIVEELFKQSRKVTKKLLEKFLSNEFGLVDVAIKGIETSFNAGYGTYHDFLKIGITREQLDKEENSETLEEIVKILTVFEDRKMIREQLKKYTYLFDEEVLKKLERRHYTGWGRLSAKLLIGIKEKRTHKTILDYLIEDDGGKQPINRNLMQLINDSDLSFKSEIAEAQSDMNTEDLHEVVQNLAGSPAIKKGILQSLKIVDELVDIMGSLPKNIVVEMARENQTTSRGRTNSNPRMKALEEAMRNLRSNLLKEYPTDNQALQNDRLYLYYLQNGKDMYTGLDLSLHNLSSYDIDHIVPQSFTTDNSLDNRVLVSSKENRGKKDDVPSKEVVQKNITLWETLKNSNLISQKKYDNLTKGLRGGLTEDDRAHFIKRQLVETRQITKHVARILDQRFNSQKDEEGKTIRAVRVVTLKSSLTSQFRKQFAIHKVREINDYHHGHDAYLNGVVANSLLRVYPQLQPEFVYGDYPKFNAYKANKATAKKQLYTNIMKFFAEDAVIIDENGEILWDKKNIATVKKVMSYPQMNIVKKPEIQTGSFSKETIKPKGDSDKLISRKTNWSPKLYGGFDSPQVAYSVIITYEKGKKKVRAKAIVGITIMEQSLFKKDPVSLLEEKGYANPEVLIHLPKYTLYELENGRRRLLASANEAQKGNQLVLPASLVTLLYHAKQVDEDSGKSEEYVREHRAEFAEILNYVQAFSETKILANKNLQTILKLYEENKEADIKEIAESFVNLMKFSAYGAPMDFKFFGKTIPRSRYTSVGELLSATIINQSITGLYETRRKLVD

SEQ ID NO: 226 - protein, 1330 aa, Enterococcus sp. AM1
MGKEYTIGLDIGTNSVGWAVLQEDLDLVRRKMKVYGNTEKNYLKKNFWGVDLFDEGMTAKDTRLKRTTRRRYFRRRQRISYLQTFFQEEMNRIDPNFFNRLDESFLIEEDKLSERHPIFGTIEEEVAYHKNYATIYHLRKELADAEEKADLRLVYLALAHIIKYRGHFLIEGRLSTENTSTEETFKTFLQKYNQTFNPVDETISIGSIFADKVSRAKKAEGVLALFPDEKRNGTFDQFLKMIVGNQGNFKKTFELEEDAKLQFSKEEYDESLEALLGEIGDEYADVFEAAKNVYNAVELSGILTVTDNSTKAKLSASMIKRYEDHKTDLKLFKEFIRKNLPEKYHEIFNDKNTDGYAGYIDNSKKTSQEKFYKYITNLIEKIDGAEYFLKKIENEDFLRKQRTFDNGIIPHQIHLEELKAILHHQAMYYPFLQEKFSNFVDLLTFRIPYYVGPLANGNSRFSWLSRKSDEPIRPWNLAEVVDLSKSAELFIERMTNFDLYLPSEKVLPKHSMLYEKYTVYNELTKVTYKDEQGKVQNFSSEEKERIFIDLFKQHRKVTKKDLSNFLRNEYNLDDVIIDGIENKFNASFNTYHDFLKLKIDPKVLDDPANEPMFEEIVKILTIFEDRKMLREQLSKFSDRLSEKTIKDLERRHYTGWGRLSAKLINGIHDKQSNKTILDYLINDDAPKKNINRNFMQLINDNRLTFKEEIEKEQLKANSEESLIEIVQNLAGSPAIKKGIFQSLKIVDELVEIMGYAPTNIVVEMARENQTTANGRRNSRPRLKNLEKAIDDLDSEILKKHPVDNKALQKDRLYLYYLQNGKDMYTNEELDIHKLSTYDIDHIIPQSFIVDNSLDNRVLVSSSKNRGKLDDVPSKEVVKKMRAFWESLYRSGLISKKKFDNLVKAESGGLSEDDKAGFIHRQLVETRQITKNVARILHQRFNSEKDEEGNLIRKVRIITLKSALTSQFRKNYGIYKIREINDYHHAHDAYLNGVVATALLKIYPQLEPEFVYGEFHRFNAFKENKATAKKQFYSNLMEFSKSDKVIIDENGEILWNQKKIVTVKKVMNYRQMNIVKKVEIQKGGFSKESILPKGDSDKLISRKKEWDTTKYGGFDSPNVAYSVVIRYEKGKTRKLVKTIVGITIMERAAFEKNEREFLKNKGYQNPQICMKLPKYSLYEFDDGRRRLLASAKEAQKGNQMVLPAHLVTFLYHAKHCNEKPDSLKYVTEHQSGFSEIMAHVKDFAEKYTLVDKNLEKILSLYAKNMDSEVKEIAQSFVDLMQLNAFGAPADFKFFGETIPRKRYTSVNELLEATIINQSITGLYETRRRLGD

SEQ ID NO: 227 - protein, 1339 aa, Enterococcus villorum
MNKAYTLGLDIGTNSVGWAVVTDDYRLMAKKMPVHSKMEKKKIKKNFWGARLFDEGQTAEERRNKRATRRRLRRRKYRILELQKIFSEEILKKDSHFFARLDESFLIPEDKQYARFPIFPTLLEEKAYYQNYPTIYHLRQKLADSTEKADIRLVYLALAHMIKYRGHFLFEGELDTENTSVEETFKEFIDIYNEQFEEGIIFYKDIPLILTDKLSKSKKVEKILQYYPKEKTTGCLAQFLKLIVGNQGNFKQAFHLDEEVKIQISKETYEEDLEKLLRKSNEEMIDVFLQVKKVYDAILLSDILSTKMKDTKAKLSAGMIERYQNHKKDLEELKQFVRAHLHEKVTVFFKDSSKDGYAGYIDGKTTQADFYKFLKKELTGVPGSEPMLAKIDQENFLLKQRTPTNGVIPHQVHLTEFKAIIDQQKQYYPFLEKSKEKMIQLLTFRIPYYVGPLAQDKETSSFAWLERKTTEKIKPWNAKDVIDYGASATKFIQRMINYDTYLPTEKVLPKYSMLYQKYTIFNELTKVAYKDDRGIKHQFSSEEKLRIFQELFKKQRRVTKKKLQHFLSANYNIEDAEILGVDKVFNSSYATYHDFLELAKPYTEKIIELLEQPEMEEMFEDIVKIITIFEDREMVRTQLKKYQRILGEEIFKKLVKKKYTGWGRLSKRLINGIRDQKTNKTILDYLINDDDFPYNRNRNFMQLINDDHLSFKEEIAKELTLSDKQSLLEVVEAIPGSPAIKKGIWQTLKIVEELIAIIGYKPKNIVIEMARENQTTTGGKNRSKPRLKSLEEALKNFDSQLLKERPVDNQSLQKDRLYLYYLQNGKDMYTGESLDIDRLSEYDIDHIIPRSFIVDHSLDNKVLVSSKENRLKKDDVPDSKVVKRMKAYWEKLLRANLISERKFSYLTKLELTDDDKARFIQRQLVETRQITKHVAAILHQYFNQTQELEKEKDIRIITLKSSLVSQFRQVFGIHKVREINHHHHAHDAYLNAVVALALLKKYPRLAPEFVYGSFAKFHLVKENKATAKKEFYSNILKFFEKEEQFCDENGEIFWDKRKHIQQIKKVISSHQVNIVKKVEVQTGSFYKETVNTKEKPDKLIKRKNNWDVTKYGGFGSPVVAYAVVFTYEKGKNHKKAKAIEGITIMEQALFEKDPISFLIEKGYSNVNQFIKLPKYTLFELANGQRRMLASHQELQKANSFILPEKLVTLLYHANHYDEIAYKDSYDYVNEHFSNFQDILDKVIIFAEKYTSAPQKLNQIIATYEKNQEADRKIMAHSFVNLMQFNALGAPADFKFFDTTITRKRYTSLTEIWQSTIIYQSVTGLYETRRRMADLWDGVQ

SEQ ID NO: 228 - protein, 1424 aa, Artificial Sequence
  Synthetic polypeptide
MDYKDHDGDYKDHDIDYKDDDDKMAPKKKRKVGIHGVPAADKKYSIGLDIGTNSVGWAVITDEYKVPSKKFKVLGNTDRHSIKKNLIGALLFDSGETAEATRLKRTARRRYTRRKNRICYLQEIFSNEMAKVDDSFFHRLEESFLVEEDKKHERHPIFGNIVDEVAYHEKYPTIYHLRKKLVDSTDKADLRLIYLALAHMIKFRGHFLIEGDLNPDNSDVDKLFIQLVQTYNQLFEENPINASGVDAKAILSARLSKSRRLENLIAQLPGEKKNGLFGNLIALSLGLTPNFKSNFDLAEDAKLQLSKDTYDDDLDNLLAQIGDQYADLFLAAKNLSDAILLSDILRVNTEITKAPLSASMIKRYDEHHQDLTLLKALVRQQLPEKYKEIFFDQSKNGYAGYIDGGASQEEFYKFIKPILEKMDGTEELLVKLNREDLLRKQRTFDNGSIPHQIHLGELHAILRRQEDFYPFLKDNREKIEKILTFRIPYYVGPLARGNSRFAWMTRKSEETITPWNFEEVVDKGASAQSFIERMTNFDKNLPNEKVLPKHSLLYEYFTVYNELTKVKYVTEGMRKPAFLSGEQKKAIVDLLFKTNRKVTVKQLKEDYFKKIECFDSVEISGVEDRFNASLGTYHDLLKIIKDKDFLDNEENEDILEDIVLTLTLFEDREMIEERLKTYAHLFDDKVMKQLKRRRYTGWGRLSRKLINGIRDKQSGKTILDFLKSDGFANRNFMQLIHDDSLTFKEDIQKAQVSGQGDSLHEHIANLAGSPAIKKGILQTVKVVDELVKVMGRHKPENIVIEMARENQTTQKGQKNSRERMKRIEEGIKELGSQILKEHPVENTQLQNEKLYLYYLQNGRDMYVDQELDINRLSDYDVDHIVPQSFLKDDSIDNKVLTRSDKNRGKSDNVPSEEVVKKMKNYWRQLLNAKLITQRKFDNLTKAERGGLSELDKAGFIKRQLVETRQITKHVAQILDSRMNTKYDENDKLIREVKVITLKSKLVSDFRKDFQFYKVREINNYHHAHDAYLNAVVGTALIKKYPKLESEFVYGDYKVYDVRKMIAKSEQEIGKATAKYFFYSNIMNFFKTEITLANGEIRKRPLIETNGETGEIVWDKGRDFATVRKVLSMPQVNIVKKTEVQTGGFSKESILPKRNSDKLIARKKDWDPKKYGGFDSPTVAYSVLVVAKVEKGKSKKLKSVKELLGITIMERSSFEKNPIDFLEAKGYKEVKKDLIIKLPKYSLFELENGRKRMLASAGELQKGNELALPSKYVNFLYLASHYEKLKGSPEDNEQKQLFVEQHKHYLDEIIEQISEFSKRVILADANLDKVLSAYNKHRDKPIREQAENIIHLFTLTNLGAPAAFKYFDTTIDRKRYTSTKEVLDATLIHQSITGLYETRIDLSQLGGDKRPAATKKAGQAKKKKK

SEQ ID NO: 229 - protein, 1343 aa, Kandleria vitulina
MSQNNNKIYNIGLDIGDASVGWAVVDEHYNLLKRHGKHMWGSRLFTQANTAVERRSSRSTRRRYNKRRERIRLLRGIMEDMVLDVDPTFFIRLANVSFLDQEDKKDYLKENYHSNYNLFIDKDFNDKTYYDKYPTIYHLRKHLCESKEKEDPRLIYLALHHIVKYRGNFLYEGQKFSMDVSNIEDKMIDVLRQFNEINLFEYVEDRKKIDEVLNVLKEPLSKKHKADKAFALFDTTKDNKAAYKELCAALAGNKFNVTKMLKEAELHDEDEKDISFKFSDATFDDAFVEKQPLLGDCVEFIDLLHDIYSWVELQNILGSAHTSEPSISAAMIQRYEDHKNDLKLLKDVIRKYLPKKYFEVFRDEKSKKNNYCNYINHPSKTPVDEFYKYIKKLIEKIDDPDVKTILNKIELESFMLKQNSRTNGAVPYQMQLDELNKILENQSVYYSDLKDNEDKIRSILTFRIPYYFGPLNITKDRQFDWIIKKEGKENERILPWNANEIVDVDKTADEFIKRMRNFCTYFPDEPVLAKNSLTVSKYEVLNEINKLRINDHLIKRDIKDKMLHTLFMDHKSISANAMKKWLVKNQYFSNTDDIKIEGFQKENACSTSLTPWIDFTKIFGEINNSNYELIEKIIYDVTVFEDKKILRRRLKKEYDLDEEKIKKILKLKYSGWSRLSKKLLSGIKTKYKDSTRTPETVLEVMERTNMNLMQVINDEKLGFKKTIDDANSTSVSGKFSYAEVQELAGSPAIKRGIWQALLIVDEIKKIMKHEPAHVYIEFARNEDEKERKDSFVNQMLKLYKDYDFEDETEKEANKHLKGEDAKSKIRSERLKLYYTQMGKCMYTGKSLDIDRLDTYQVDHIVPQSLLKDDSIDNKVLVLSSENQRKLDDLVIPEMIRNKMFGFWNKLYENKIISPKKFYSLIKSEYSDKDKERFINRQIVETRQITKHVAQIISNHYETTKVVTVRADLSHAFRERYHIYKNRDINDFHHAHDAYIATILGTYIGHRFESLDAKYIYGEYQKIFRNNKNKDKEFNKNKDGFILNSMRNLYADKDTGEVVWDPEWISRIKKCFYYKDCFVTKKLEENNGSFFNLTVRPNDEHSEKGTTIAKVPVNKLRSNVHKYGGFEGLKYSIVAIKGKKKKGKKIIDVNKLVGIPLMYKNVDDETKINYIKESEGLEEVKIIKEILKNQLIEINGGLFYVTSPTEIVNARQLILDFNCTRIIDGIYKAMKYKNYSELSQEEIMNVYDIFVEKLKLYYPTYKNIATNFENMREQFENISDEEKCEVIRQMLVVMHAGPQNGNITFDDFKLSNRLGRLNCKTISLDTTVFIADSPTGMYSKKYKL

SEQ ID NO: 230 - protein, 1344 aa, Kandleria vitulina
MSQNNNKIYNIGLDIGDASVGWAVVDEHYNLLKRHGKHMWGSRLFTQANTAVERRSSRSTRRRYNKRRERIRLLREIMEDMVLDVDPTFFIRLANVSFLDQEDKKDYLKENYHSNYNLFIDKDFNDKTYYDKYPTIYHLRKHLCESKEKEDPRLIYLALHHIVKYRGNFLYEGQKFSMDVSNIEDKMIDVLRQFNEINLFEYVEDRKKIDEVLNVLKEPLSKKHKAEKAFALFDTTKDNKAAYKELCAALAGNKFNVTKMLKEAELHDEDEKDISFKFSDATFDDAFVEKQPLLGDCVEFIDLLHDIYSWVELQNILGSAHTSEPSISAAMIQRYEDHKNDLKLLKDVIRKYLPKKYFEVFRDEKSKKNNYCNYINHPSKTPVDEFYKYIKKLIEKIDDPDVKTILNKIELESFMLKQNSRTNGAVPYQMQLDELNKILENQSVYYSDLKDNEDKIRSILTFRIPYYFGPLNITKDRQFDWIIKKEGKENERILPWNANEIVDVDKTADEFIKRMRNFCTYFPDEPVMAKNSLTVSKYEVLNEINKLRINDHLIKRDMKDKMLHTLFMDHKSISANAMKKWLVKNQYFSNTDDIKIEGFQKENACSTSLTPWIDFTKIFGKINESNYDFIEKIIYDVTVFEDKKILRRRLKKEYDLDEEKIKKILKLKYSGWSRLSKKLLSGIKTKYKDSTRTPETVLEVMERTNMNLMQVINDEKLGFKKTIDDANSTSVSGKFSYAEVQELAGSPAIKRGIWQALLIVDEIKKIMKHEPAHVYIEFARNEDEKERKDSFVNQMLKLYKDYDFEDETEKEANKHLKGEDAKSKIRSERLKLYYTQMGKCMYTGKSLDIDRLDTYQVDHIVPQSLLKDDSIDNKVLVLSSENQRKLDDLVIPSSIRNKMYGFWEKLFNNKIISPKKFYSLIKTEFNEKDQERFINRQIVETRQITKHVAQIIDNHYENTKVVTVRADLSHQFRERYHIYKNRDINDFHHAHDAYIATILGTYIGHRFESLDAKYIYGEYKRIFRNQKNKGKEMKKNNDGFILNSMRNIYADKDTGEIVWDPNYIDRIKKCFYYKDCFVTKKLEENNGTFFNVTVLPNDTNSDKDNTLATVPVNKYRSNVNKYGGFSGVNSFIVAIKGKKKKGKKVIEVNKLTGIPLMYKNADEEIKINYLKQAEDLEEVQIGKEILKNQLIEKDGGLYYIVAPTEIINAKQLILNESQTKLVCEIYKAMKYKNYDNLDSEKIIDLYRLLINKMELYYPEYRKQLVKKFEDRYEQLKVISIEEKCNIIKQILATLHCNSSIGKIMYSDFKISTTIGRLNGRTISLDDISFIAESPTGMYSKKYKL

SEQ ID NO: 231 - protein, 1314 aa, Lactobacillus animalis
MLKKDYSIGLDIGTNSVGHAVVTDDYKVPTKKMKVFGDTSKKTIKKNMLGVLLFNEGQTAADTRLKRGARRRYTRRKNRLRYLQEIFAPALAKVDPNFFYRLEESSLVAEDKKYDVYPIFGKREEELLYHDTHKTIYHLRSELANNDRPADLRLVYLALAHIIKYRGNFLLEGEIDLRTTDINKVFAEFSETLNENSDENLGKLDVADIFKDNTFSKTKKSEELLKLSGAKKNQLAHQLFKMMVGNMGSFKKVLGTDEEHKLSFGKDTYEDDLNDLLAEAGDQYLDIFVAAKKVYDAAILASILDVKDTQTKTVFSQAMIERYEEHQKDLIELKRVFKKYLPEKCHDFFSEPKISGYAGYIDGKVSEEDFYKYTKKTLKGIPETEEILQKIDANNYLRKQRTFDNGAIPHQVHLKELVAIVENQGKYYPFLRENKDKFEKILNFRIPYYVGPLARGNSKFAWLTRAGEGKITPYNFDEMIDKETSAEDFIKRMTINDLYLPTEPVLPKHSLLYERYTIFNELAGVRYVTENGEAKYFDAQTKRSIFELFKLDRKVSEKMVIKHLKVVMPAIRIQALKGLDNGKFNASYGTYKDLVDMGVAPELLNDEVNSEKWEDIIKTLTIFEGRKLIKRRLENYRDFLGEDILRKLSRKKYTGWGRLSAKLLDGIYDKKTHKTILDCLMTEDYSQNFMQLINDDTYSFKETIKNAQVIEKEETLAKTVQELPGSPAIKKGILQSLEIVDEIIKVMGYKPKSIVVEMARETQKTHGTRKREDRVQQIVKNLKDANELPKKLPSNAELSDERKYLYCLQNGRDMYTGAPLDYDHLQFYDVDHIIPQSFLKDDSIENKVLTIKKENVRKTNGLPSEAVIQKMGSFWKKLLDAGAMTNKKYDNLRRNLHGGLNEKLKERFIERQLVETRQITKYVAQLLDQRLNYDGNGVELDEKIAIVTLKAQLASQFRSEFKLRKVRALNNLHHAHDAYLNAVVANLIMAKYPELEPEFVYGKYRKTKFKGLGKATAKNTLYANVLYFLKENEVYPFWDKARDLPTIKRYLYRAQVNKVRKAERQTGGFSDEMLVPKSDSGKLLPRKEGLDPVKYGGYAKAVESYAVLITADEVKKGKTKKVKTLVNIPIIDSKKYEADPTAYLASRGYTNVTNSFILPKYSLLEDPEGRRRYLASFKEFQKANELILPQHLVELLYWVNAKDGEQKLEDHKAEFKELFDKIMEFADKYVVAPKNSEKIRRLYEENQDATPMELGKNFVELLRYTADGAASDFKFFGENIPRKRYNSAGSLLNGTLIYQSKTGLYETRIDLGKL

SEQ ID NO: 232 - protein, 1368 aa, Lactobacillus curvatus
MSRPYNIGLDIGTSSIGWSVVDDQSKLVSVRGKYGYGVRLYDEGQTAAERRSFRTTRRRLKRRKWRLGLLREIFEPYITPVDDTFFLRKKQSNLSPKDQRKLYPQTSLFNDRTDRAFYDDYPTIYHLRYKLMTEKRQFDIREIYLAMHHIVKYRGHFLNEAPVSSFKSSEINLVAHFDRLNTIFADLFSESGFQLETDKLAEVKALLLDNHQSASNRQRQALLLIYTPSTNKAVEKQNKAIATELLKAILGLKAKFNVLTGIEAEDVKTWTLTFNAENFDEEMVKLESSLDDNAHQIIESLQELYSGVLLAGIVPENQSLSQAMITKYDDHQKHLKMLKAVREALAPEDRQRLKQAYDQYVDGQENTKAYSKEDFYGDITKALKNNPDHPIVSEIKKLIELDQFMPKQRTKDNGAIPHQLHQQELDRIIENQQQYYPWLAELNPNSKRQTVAKYKLDELVAFRVPYYVGPLITAEQQQQSSDAKFAWMIRKAEGQITPWNFDDKVDRQASANEFIKRMTTTDTYLLAEDVLPKQSLIYQRFEVLNELNGLKIDDQPITTELKQAIFTDLFMQKTSVTVKNIQDYLVSEKRYASRPAITGLSDENKFNSRLSTYHDLKTIVGDAVDDVDKQADLEKCIEWSTIFEDGKIYSAKLNEIDWLTDQQRVQLAAKRYRGWGRLSAKLLTQIVNANGQRIMDLLWDTTDNFMRIVHSEDFDKLITEANQMMLAENDVQDVINDLYTSPQNKKALRQILLVVNDIQKAMKGQAPERILIEFAREDEVNPRLSVQRKRQVEQVYQNISNELLNNTEIRNELKDLSNSALSNTRLFLYFMQGGRDMYTGDSLNIDRLSTYDIDHILPQSFIKDNSLDNRVLVSQRMNRSKADQVPTDFTSVELGQKMQIQWEQMLRAGLITKKKYDNLTLNPDHISKYAMKGFINRQLVETRQVIKLATNLLMEQYGEDNIELITVKSGLTHQMRTEFDFPKNRNLNNHHHAFDAYLTAFVGLYLLKRYPKLKPYFVYGEYQKASQQDKWRNFNFLNGLKKDELVDENTEAVIWNKESGLAYLNKIYQFKKILVTREVHENSGALFNQTLYAAKDDKASGQGGKQLIPAKQDRPTALYGGYSGKTVAYMCIVRIKNKKGDLYKVCGVETSWLAQLKQLTDEDSKKAFLKQKISPQFTKVKKQKGTIVKVVEDFEVIAPHILINQRFFDNGQELTLGSATYKHNEQELILDKTAVKLLNGALPLTQSEELAEQVYDEILDQVMHYFPLYDTNQFRAKLSAGKAAFMKLPWKSQWDGNKMVQVGQQVILDRVLIGLHANAAVSDLGVLKISTPLGKMQQPSGISLSPDTQIIYQSPTGLFERRVALRDL

SEQ ID NO: 233 - protein, 1356 aa, Lactobacillus farciminis
MTKKEQPYNIGLDIGTGSVGWAVTNDNYDLLNIKKKNLWGVRLFEGAQTAKETRLNRSTRRRYRRRKNRINWLNEIFSEELANTDPSFLIRLQNSWVSKKDPDRKRDKYNLFIDNPYTDKEYYREFPTIFHLRKELIINKNKADIRLVYLALHNILKYRGNFTYEHQKFNISTLNSNLSKELIELNQQLIKYDISFPDNCDWNHISDILIGRGNATQKSSNILNNFTLDKETKKLLKEVINLILGNVAHLNTIFKTSLTKDEEKLSFSGKDIESKLDDLDSILDDDQFTVLDTANRIYSTITLNEILNGESYFSMAKVNQYENHAIDLCKLRDMWHTTKNEKAVGLSRQAYDDYINKPKYGTKELYTSLKKFLKVALPTNLAKEAEEKISKGTYLVKPRNSENGVVPYQLNKIEMEKIIDNQSQYYPFLKENKEKLLSILSFRIPYYVGPLQSSEKNPFAWMERKSNGHARPWNFDEIVDREKSSNKFIRRMTVTDSYLVGEPVLPKNSLIYQRYEVLNELNNIRITENLKTNPTGSRLTVETKQHIYNELFKNYKKITVKKLTKWLIAQGYYKNPILIGLSQKDEFNSTLTTYLDMKKIFGSSFMENNKNYNQIEELIEWLTIFEDKQILNEKLHSSNYSYTSDQIKKISNMRYKGWGRLSKKILTCITTETNTPKSLQLSNYSVLDLMWTTNNNFISIISNDKYDFKNYIENHNLNKNEDQNISNLVNDIHVSPALKRGITQSIKIVQEIVKFMGHAPKYIFIEVTRETKKSEITTSRGKRIQRLQSKLLNKANGFKPQLRKYLVPNEKIQEELKKHKNDLSSERIMLYFLQNGKSLYSEESLNINKLSDYQVDHILPRTYIPDDSLENKALVLAKENQRKADDLLLNSNVIDKNLERWTYMLNNNMMGLKKFKNLTRRVITDKDKLGFIHRQLVQTSQMVKGVANILNSMYKNQGTTCIQARANLSTAFRKALSDQDDRYHFKHPELVKNRNINDFHHAQDAYLASFLGTYRLRRFPTDEMLLMNGEYNKFYGQVKELYSKKKKLPDSRKNGFIISPLVNGTTQYDRNTGEIIWNVGFRDKILKIFNYHQCNVTRKTEIKTGQFYDQTIYSPKNPKYKKLIAQKKDMDPNIYGGFSGDNKSSITIVKIDNNKIKPVAIPIRLINDLKDKKTLQNWLEENVKHKKSIQIIKNNVPIGQIIYSKKVGLLSLNSDREIANRQQLILPPEHSALLRILQIPDEDPDQILAFYDKNILVEILQELITKMKKFYPFYKNEQEFLASNIENFNQATTSEKINSLEELITLLHANSTSAHLIFNNIEKKAFGRKTHGLTLNDTDFIYQSVTGLYETRIHIE

SEQ ID NO: 234 - protein, 1334 aa, Listeria innocua
MKKPYTIGLDIGTNSVGWAVLTDQYDLVKRKMKIAGDSEKKQIKKNFWGVRLFDEGQTAADRRMARTARRRIERRRNRISYLQGIFAEEMSKTDANFFCRLSDSFYVDNEKRNSRHPFFATIEEEVEYHKNYPTIYHLREELVNSSEKADLRLVYLALAHIIKYRGNFLIEGALDTQNTSVDGIYKQFIQTYNQVFASGIEDGSLKKLEDNKDVAKILVEKVTRKEKLERILKLYPGEKSAGMFAQFISLIVGSKGNFQKPFDLIEKSDIECAKDSYEEDLESLLALIGDEYAELFVAAKNAYSAVVLSSIITVAETETNAKLSASMIERFDTHEEDLGELKAFIKLHLPKHYEEIFSNTEKHGYAGYIDGKTKQADFYKYMKMTLENIEGADYFIAKIEKENFLRKQRTFDNGAIPHQLHLEELEAILHQQAKYYPFLKENYDKIKSLVTFRIPYFVGPLANGQSEFAWLTRKADGEIRPWNIEEKVDFGKSAVDFIEKMTNKDTYLPKENVLPKHSLCYQKYLVYNELTKVRYINDQGKTSYFSGQEKEQIFNDLFKQKRKVKKKDLELFLRNMSHVESPTIEGLEDSFNSSYSTYHDLLKVGIKQEILDNPVNTEMLENIVKILTVFEDKRMIKEQLQQFSDVLDGVVLKKLERRHYTGWGRLSAKLLMGIRDKQSHLTILDYLMNDDGLNRNLMQLINDSNLSFKSIIEKEQVTTADKDIQSIVADLAGSPAIKKGILQSLKIVDELVSVMGYPPQTIVVEMARENQTTGKGKNNSRPRYKSLEKAIKEFGSQILKEHPTDNQELRNNRLYLYYLQNGKDMYTGQDLDIHNLSNYDIDHIVPQSFITDNSIDNLVLTSSAGNREKGDDVPPLEIVRKRKVFWEKLYQGNLMSKRKFDYLTKAERGGLTEADKARFIHRQLVETRQITKNVANILHQRFNYEKDDHGNTMKQVRIVTLKSALVSQFRKQFQLYKVRDVNDYHHAHDAYLNGVVANTLLKVYPQLEPEFVYGDYHQFDWFKANKATAKKQFYTNIMLFFAQKDRIIDENGEILWDKKYLDTVKKVMSYRQMNIVKKTEIQKGEFSKATIKPKGNSSKLIPRKTNWDPMKYGGLDSPNMAYAVVIEYAKGKNKLVFEKKIIRVTIMERKAFEKDEKAFLEEQGYRQPKVLAKLPKYTLYECEEGRRRMLASANEAQKGNQQVLPNHLVTLLHHAANCEVSDGKSLDYIESNREMFAELLAHVSEFAKRYTLAEANLNKINQLFEQNKEGDIKAIAQSFVDLMAFNAMGAPASFKFFETTIERKRYNNLKELLNSTIIYQSITGLYESRKRLDD

SEQ ID NO: 235 - protein, 1334 aa, Listeria innocua
MKKPYTIGLDIGTNSVGWAVLTDQYDLVKRKMKIAGDSEKKQIKKNFWGVRLFDEGQTAADRRMARTARRRIERRRNRISYLQGIFAEEMSKTDANFFCRLSDSFYVDNEKRNSRHPFFATIEEEVEYHKNYPTIYHLREELVNSSEKADLRLVYLALAHIIKYRGNFLIEGALDTQNTSVDGIYKQFIQTYNQVFASGIEDGSLKKLEDNKDVAKILVEKVTRKEKLERILKLYPGEKSAGMFAQFISLIVGSKGNFQKPFDLIEKSDIECAKDSYEEDLESLLALIGDEYAELFVAAKNAYSAVVLSSIITVAETETNAKLSASMIERFDTHEEDLGELKAFIKLHLPKHYEEIFSNTEKHGYAGYIDGKTKQADFYKYMKMTLENIEGADYFIAKIEKENFLRKQRTFDNGAIPHQLHLEELEAILHQQAKYYPFLKENYDKIKSLVTFRIPYFVGPLANGQSEFAWLTRKADGEIRPWNIEEKVDFGKSAVDFIEKMTNKDTYLPKENVLPKHSLCYQKYLVYNELTKVRYINDQGKTSYFSGQEKEQIFNDLFKQKRKVKKKDLELFLRNMSHVESPTIEGLEDSFNSSYSTYHDLLKVGIKQEILDNPVNTEMLENIVKILTVFEDKRMIKEQLQQFSDVLDGVVLKKLERRHYTGWGRLSAKLLMGIRDKQSHLTILDYLMNDDGLNRNLMQLINDSNLSFKSIIEKEQVTTADKDIQSIVADLAGSPAIKKGILQSLKIVDELVSVMGYPPQTIVVEMARENQTTGKGKNNSRPRYKSLEKAIKEFGSQILKEHPTDNQELRNNRLYLYYLQNGKDMYTGQDLDIHNLSNYDIDHIVPQSFITDNSIDNLVLTSSAGNREKGDDVPPLEIVRKRKVFWEKLYQGNLMSKRKFDYLTKAERGGLTEADKARFIHRQLVETRQITKNVANILHQRFNYEKDDHGNTMKQVRIVTLKSALVSQFRKQFQLYKVRDVNDYHHAHDAYLNGVVANTLLKVYPQLEPEFVYGDYHQFDWFKANKATAKKQFYTNIMLFFAQKDRIIDENGEILWDKKYLDTVKKVMSYRQMNIVKKTEIQKGEFSKATIKPKGNSSKLISRKTNWDPMKYGGLDSPNMAYAVVIEYAKGKNKLVFEKKIIRVTIMERKAFEKDEKAFLEEQGYRQPKVLAKLPKYTLYECEEGRRRMLASANEAQKGNQQVLPNHLVTLLHHVANCEVSDGKSLDYIESNREMFAELLAHVSEFAKRYTLAEANLNKINQLFEQNKEGDIKAIAQSFVDLMAFNAMGAPASFKFFETTIERKRYNNLKELLNSTIIYQSITGLYESRKRLDD

SEQ ID NO: 236 - protein, 1337 aa, Listeria innocua ATCC 33091
MKNMKKPYTIGLDIGTNSVGWAVLTDQYDLVKRKMKIAGDSEKKQIKKNFWGVRLFDEGQTAADRRMARTARRRIERRRNRISYLQGIFAEEMSKTDANFFCRLSDSFYVDNEKRNSRHPFFATIEEEVEYHKNYPTIYHLREELVNSSEKADLRLVYLALAHIIKYRGNFLIEGALDTQNTSVDGIYKQFIQTYNQVFASGIEDGSLKKLEDNKDVAKILVEKVTRKEKLERILKLYPGEKSAGMFAQFISLIVGSKGNFQKPFDLIEKSDIECAKDSYEEDLESLLALIGDEYAELFVAAKNAYSAVVLSSIITVAETETNAKLSASMIERFDTHEEDLGELKAFIKLHLPKHYEEIFSNTEKHGYAGYIDGKTKQADFYKYMKMTLENIEGADYFIAKIEKENFLRKQRTFDNGAIPHQLHLEELEAILHQQAKYYPFLKENYDKIKSLVTFRIPYFVGPLANGQSEFAWLTRKADGEIRPWNIEEKVDFGKSAVDFIEKMTNKDTYLPKENVLPKHSLCYQKYLVYNELTKVRYINDQGKTSYFSGQEKEQIFNDLFKQKRKVKKKDLELFLRNMSHVESPTIEGLEDSFNSSYSTYHDLLKVGIKQEILDNPVNTEMLENIVKILTVFEDKRMIKEQLQQFSDVLDGVVLKKLERRHYTGWGRLSAKLLMGIRDKQSHLTILDYLMNDDGLNRNLMQLINDSNLSFKSIIEKEQVTTADKDIQSIVADLAGSPAIKKGILQSLKIVDELVSVMGYPPQTIVVEMARENQTTGKGKNNSRPRYKSLEKAIKEFGSQILKEHPTDNQELRNNRLYLYYLQNGKDMYTGQDLDIHNLSNYDIDHIVPQSFITDNSIDNLVLTSSAGNREKGDDVPPLEIVRKRKVFWEKLYQGNLMSKRKFDYLTKAERGGLTEADKARFIHRQLVETRQITKNVANILHQRFNYEKDDHGNTMKQVRIVTLKSALVSQFRKQFQLYKVRDVNDYHHAHDAYLNGVVANTLLKVYPQLEPEFVYGDYHQFDWFKANKATAKKQFYTNIMLFFAQKDRIIDENGEILWDKKYLDTVKKVMSYRQMNIVKKTEIQKGEFSKATIKPKGNSSKLISRKTNWDPMKYGGLDSPNMAYAVVIEYAKGKNKLVFEKKIIRVTIMERKAFEKDEKAFLEEQGYRQPKVLAKLPKYTLYECEEGRRRMLASANEAQKGNQQVLPNHLVTLLHHVANCEVSDGKSLDYIESNREMFAELLAHVSEFAKRYTLAEANLNKINQLFEQNKEGDIKAIAQSFVDLMAFNAMGAPASFKFFETTIERKRYNNLKELLNSTIIYQSITGLYESRKRLDD

SEQ ID NO: 237 - protein, 1103 aa, Listeria innocua FSL S4-378
LKLYPGEKSTGMFAQFISLIVGSKGNFQKPFDLIEKSDIECAKDSYEEDLESLLALIGDEYAELFVAAKNAYSAVVLSSIITVAETETNAKLSASMIERFDTHEEDLGELKAFIKLHLPKHYEEIFSNTEKHGYAGYIDGKTKQADFYKYMKTTLENIEGADYFIAKIEKENFLRKQRTFDNGAIPHQLHLEELEAILHQQAKYYPFLKENYDKIKSLVTFRIPYFVGPLANGQSEFAWLTRKADGEIRPWNIEEKVDFGKSAVDFIEKMTNKDTYLPKENVLPKHSLCYQKYLVYNELTKVRYINDQGKTSYFSGQEKEQIFNDLFKQKRKVKKKDLELFLRNMSHVESPTIEGLEDSFNSSYSTYHDLLKVGIKQEILDNPVNTEMLENIVKILTVFEDKRMIKEQLQQFSDVLDGVVLKKLERRHYTGWGRLSAKLLMGIRDKQSHLTILDYLMNDDGLNRNLMQLINDSNLSFKSIIEKEQVTTADKDIQSIVADLAGSPAIKKGILQSLKIVDELVSVMGYPPQTIVVEMARENQTTGKGKNNSRPRYKSLEKAIKEFGSQILKEHPTDNQELKNNRLYLYYLQNGKDMYTGQDLDIHNLSNYDIDHIVPQSFITDNSIDNLVLTSSAGNREKGNDVPPLEIVQKRKVFWEKLYQGNLMSKRKFDYLTKAERGGLTEADKARFIHRQLVETRQITKNVANILHQRFNYGKDDHGNTMKQVRIVTLKSALVSQFRKQFQLYKVRGVNDYHHAHDAYLNGVVANTLLKVYPQLEPEFVYGDYHQFDWFKANKATAKKQFYTNIMLFFAQKDRIIDENGEILWDKKYLDTVKKVMSYRQMNIVKKTEIQKGEFSKATIKPKGNSSKLIPRKTNWDPMKYGGLDSPNMAYAVVIEYAKGKNKLVFEKKIIRVTIMERKAFEKDEKAFLEEQGYRQPKVLAKLPKYTLYECEEGRRRMLASANEAQKGNQQVLPNHLVTLLHHAANCEVSDGKSLDYIESNREMFAELLAHVSEFAKRYTLAEANLNKINQLFEQNKEGDIKAIAQSFVDLMAFNAMGAPASFKFFETTIERKRYNNLKELLNSTIIYQSITGLYESRKRLDD

SEQ ID NO: 238 - protein, 1334 aa, Listeria ivanovii
MRKPYTIGLDIGTNSVGWAVLTDQYNLVKRKMKVAGSAEKKQIKKNFWGVRLFDEGEVAAGRRMNRTTRRRIERRRNRIAYLQEIFAAEMAEVDANFFYRLEDSFYIESEKRHSRHPFFATIEEEVAYHEEYKTIYHLREKLVNSSDKADLRLVYLALAHIIKYRGNFLIEGMLDTKNTSVDEVFKQFIQTYNQIFASDIEEGSLTRLEENKEVAEILSEKLTRREKLDKILKLYTGEKSTGMFARFINLIIGSKGDFKKVFDLDEKAEIECAKDTYEEDLEALLAKIGDEYAEIFVAAKSTYNAVVLSNIITVTDTETKAKLSASMIERFDKHAKDLKRLKAFFKMQLPEKFNEVFNDIEKDGYAGYIDGKTTQEKFYKYMKKMLANIDGADYFIDQIEEENFLRKQRTFDNGTIPHQLHLEELEAILHQQAKYYPFLRKDYEKIRSLVTFRIPYFIGPLANGQSDFAWLTRKADGEIRPWNIEEKVDFGKSAIDFIEKMTNKDTYLPKENVLPKHSLCYQKYMVYNELTKIRYIDDQGKTHHFSGQEKQQIFNGLFKQQRKVKKKDLERFLYTINHIESPTIEGVEDAFNSSFATYHDLQKGGVTQEILDNPLNADMLEEIVKILTVFEDKRMIKEQLQSFSDVLDGTILKKLERRHYTGWGRLSAKLLTGIRDKHSHLTILDYLMNDDGLNRNLMQLINDSNLSFKSIIEKEQVSTADKGIQSIVAELAGSPAIKKGILQSLKIVDELVGIMGYPPQTIVVEMARENQTTGKGKNNSKPRFISLEKAIKEFGSQILKEHPTDNQCLKNDRLYLYYLQNGKDMYTGKELDIHNLSNYDIDHIIPQSFITDNSIDNRVLVSSTANREKGDNVPLLEVVRKRKAFWEKLYQAKLMSKRKFDYLTKAERGGLTEADKANFIQRQLVETRQITKNVANILYQRFNCKQDENGNEVEQVRIVTLKSTLVSQFRKQFQLYKVREVNDYHHAHDAYLNGVVANTLLKVYPQLEPEFVYGDYHQFDWFKANKATAKKQFYTNIMRFFAKENQIIDKNGEILWDNRYLDTIKKVLSYRQMNIVKKTEIQKGEFSNATVNPKGNSSKLISRKADWNPIKYGGFDGSNMAYSIVIEYEKRKKKTVIKKELIQINIMERVAFEKDQKAFLEEKGYYSPKVLTKIPKYTLYECENGRRRMLGSANEAQKGNQMVLPNHLMTLLYHAKNCEANDGESLAYIEMHREMFAELLAYISEFAKRYTLANDRLEKINMFFEQNKKGDIKVIAKSFDKLKVFNAFGAPRDFEFFETTIKRKRYYNIKELLNATIIYQSITGLYEARKRLED

SEQ ID NO: 239 - protein, 953 aa, Listeria ivanovii FSL F6-596
MKKMLANIDGADYFIDQIEEENFLRKQRTFDNGTIPHQLHLEELEAILHQQAKYYPFLRKDYEKIRSLVTFRIPYFIGPLANGQSDFAWLTRKADGEIRPWNIEEKVDFGKSAIDFIEKMTNKDTYLPKENVLPKHSLCYQKYMVYNELTKIRYIDDQGKTHHFSGQEKQQIFNGLFKQQRKVKKKDLERFLYTINHIESPTIEGVEDAFNSSFATYHDLQKGGVTQEILDNPLNADMLEEIVKILTVFEDKRMIKEQLQSFSDVLDGTILKKLERRHYTGWGRLSAKLLTGIRDKHSHLTILDYLMNDDGLNRNLMQLINDSNLSFKSIIEKEQVSTADKGIQSIVAELAGSPAIKKGILQSLKIVDELVGIMGYPPQTIVVEMARENQTTGKGKNNSKPRFISLEKAIKEFGSQILKEHPTDNQCLKNDRLYLYYLQNGKDMYTGKELDIHNLSNYDIDHIIPQSFITDNSIDNRVLVSSTANREKGDNVPLLEVVRKRKAFWEKLYQAKLMSKRKFDYLTKAERGGLTEADKANFIQRQLVETRQITKNVANILYQRFNCKQDENGNEVEQVRIVTLKSTLVSQFRKQFQLYKVREVNDYHHAHDAYLNGVVANTLLKVYPQLEPEFVYGDYHQFDWFKANKATAKKQFYTNIMRFFAKENQIIDKNGEILWDNRYLDTIKKVLSYRQMNIVKKTEIQKGEFSNATVNPKGNSSKLISRKADWNPIKYGGFDGSNMAYSIVIEYEKRKKKTVIKKELIQINIMERVAFEKDQKAFLEEKGYYSPKVLTKIPKYTLYECENGRRRMLGSANEAQKGNQMVLPNHLMTLLYHAKNCEANDGESLAYIEMHREMFAELLAYISEFAKRYTLANDRLEKINMFFEQNKKGDIKVIAKSFDKLKVFNAFGAPRDFEFFETTIKRKRYYNIKELLNATIIYQSITGLYEARKRLED

SEQ ID NO: 240 - protein, 1334 aa, Listeria monocytogenes
MKNPYTIGLDIGTNSVGWAVLTNQYDLVKRKMKVAGNSDKKQIKKNFWGVRLFDDGQTAVDRRMNRTARRRIERRRNRISYLQEIFAVEMANIDANFFCRLNDSFYVDSEKRNSRHPFFATIEEEVAYHDNYRTIYHLREKLVNSSEKADLRLVYLALAHIIKYRGNFLIEGALDTKNTSVDEVYKQFIETYNQVFMSNIEEGALAKVEENIEVANILAGKFTRREKFERILQLYPGEKSTGMFAQFISLIVGSKGNFQKVFDLIEKTDIECAKDSYEEDLETLLAIIGDEYAELFVAAKNTYNAVVLSSIITVTDTETNAKLSASMIERFDAHEKDLVELKAFIKLNLPKQYEEIFSNAAIDGYAGYIDGKTKQVDFYKYLKTILENIEGSDYFIAKIEEENFLRKQRTFDNGAIPHQLHLEELEAIIHQQAKYYPFLKEDYDKIKSLVTFRIPYFVGPLANGQSEFAWLTRKADGEIRPWNIEEKVDFGKSAVDFIEKMTNKDTYLPKENVLPKHSLCYQKYMVYNELTKIRYIDDQGKTNYFSGREKQQVFNDLFKQKRKVKKKDLELFLRNINHIESPTIEGLEDSFNASYATYHDLLKVGMKQEILDNPLNTEMLEDIVKILTVFEDKPMIKEQLQQFSDVLDGGVLKKLERRHYTGWGRLSAKLLVGIREKQSHLTILDYLMNDDGLNRNLMQLINDSNLSFKSIIEKEQVSTTDKDLQSIVAELAGSPAIKKGILQSLKIVDELVSIMGYPPQTIVVEMARENQTTGKGKNNSKPRYKSLEKAIKEFGSQILKEHPTDNQELKNNRLYLYYLQNGKDMYTGQELDIHNLSNYDIDHIVPQSFITDNSIDNLVLTSSAGNREKGGDVPPLEIVRKRKVFWEKLYQGNLMSKRKFDYLTKAERGGLTEADKARFIHRQLVETRQITKNVANILYQRFNKETDNHGNTMEQVRIVTLKSALVSQFRKQFQLYKVREVNGYHHAHDAYLNGVVANTLLKVYPQLEPEFVYGEYHQFDWFKANKATAKKQFYTNIMLFFAQKERIIDENGEILWDKKYLETIKKVLDYRQMNIVKKTEIQKGEFSKATIKPKGNSSKLIPRKENWDPMKYGGLDSPNMAYAVIIEHAKGKKKIVIEKKLIQINIMERKMFEKDEEAFLEEKGYRHPKVLTKLPKYTLYECEKGRRRMLASANEAQKGNQLVLSNHLVSLLYHAKNCEASDGKSLKYIEAHRETFSELLAQVSEFATRYTLADANLSKINNLFEQNKEGDIKAIAQSFVDLMAFNAMGAPASFKFFEATIDRKRYTNLKELLSSTIIYQSITGLYESRKRLDD

SEQ ID NO: 241 - protein, 1334 aa, Listeria monocytogenes
MKNPYTIGLDIGTNSVGWAVLTDQYDLVKRKMKVAGNSDKKQIKKNFWGVRLFDDGQTAVDRRMNRTARRRIERRRNRISYLQEIFAVEMANIDANFFCRLNDSFYVDSEKRNSRHPFFATIEEEVAYHKNYRTIYHLREELVNSSEKADLRLVYLALAHIIKYRGNFLIEGALDTKNTSVDEVYKQFIQTYNQVFMSNIEEGALAKVEENTEVASILAGKFTRREKFERILRLYPGEKSTGMFAQFISLIVGNKGNFQKVFNLVEKTDIECAKDSYEEDLEALLAIIGDEYAELFVAAKNTYNAVVLSSIITVTATETNAKLSASMIERFDAHEKELGELKAFIKLHLPKQYQEIFNNAEIDGYAGYIDGKTKQVDFYKYLKTTLENVEGADYFITKIEEENFLRKQRTFDNGVIPHQLHLEELEAILHQQAKYYPFLREGYDKIKSLVTFRIPYFVGPLANGQSEFAWLTRKDDGEIRPWNIEEKVDFGKSAVDFIEKMTNKDTYLPKENVLPKHSLCYQKYMVYNELTKIRYIDDQGKTNYFSGREKQQIFNDLFKQKRKVKKKDLELFLRNINHIESPTIEGLEDSFNASYATYHDLLKVGLKQEILDNPLNTEILEDIVKILTVFEDKRMIKEQLEQFSDVLDGVVLKKLERRHYTGWGRLSAKLLVGIRDKQSHLTILDYLMNDDGLNRNLMQLINDSNLSFKSIIEKEQVSTTDKDLQSIVADLAGSPAIKKGILQSLKIVDELVSIMGYPPQTIVVEMARENQTTGKGKNNSKPRYKSLEKAIKDFGSQILKEHPTDNQELKNNRLYLYYLQNGKDIYTGQELDIHNLSNYDIDHIVPQSFITDNSIDNLVLTSSAGNREKGGDVPPLEIVRKRKVFWEKLYQGNLMSKRKFDYLTKAERGGLTEADKARFIHRQLVETRQITKNVANILHQRFNKETDNHGNTMEQVRIVTLKSALVSQFRKQFQLYKVREVNDYHHAHDAYLNGVVANTLLKVYPQLEPEFVYGEYHQFDWFKANKATAKKQFYTNIMLFFAQKERIIDENGEILWDKKYLETIKKVLDYRQINIVKKTEIQKGEFSKATIKPKGNSSKLIPRKENWDPMKYGGLDSPNMAYAVIIEHAKGKKKIVIEKKLIQINIMERKMFEKDEEAFLEEKGYHQPKVLTKLPKYTLYECEKGRRRMLSSANEAQKGNQLVLSNHLVSLLYHAKNCEASDGKSLKYIEAHRETFSELLAQVSEFATKYTLADANLSKINNLFEQNKEGDIKAIAQSFVDLMAFNAMGAPASFKFFEATIDRKRYTNLKELLSSTIIYQSITGLYESRKRLDD

SEQ ID NO: 242 - protein, 1334 aa, Listeria monocytogenes
MKNPYTIGLDIGTNSVGWAVLTDQYDLVKRKMKVAGNSDKKQIKKNFWGVRLFDDGQTAVDRRMNRTARRRIERRRNRISYLQEIFAVEMANIDANFFCRLNDSFYVDSEKRNSRHPFFATIEEEVAYHKNYRTIYHLREELVNSSEKADLRLVYLALAHIIKYRGNFLIEGALDTKNTSVDEVYKQFIQTYNQVFMSNIEEGALAKVEENTEVASILAGKFTRREKFERILRLYPGEKSTGMFAQFISLIVGNKGNFQKVFNLVEKTDIECAKDSYEEDLEALLAIIGDEYAELFVAAKNTYNAVVLSSIITVTATETNAKLSASMIERFDAHEKELGELKAFIKLHLPKQYQEIFNNAEIDGYAGYIDGKTKQVDFYKYLKTTLENVEGADYFITKIEEENFLRKQRTFDNGVIPHQLHLEELEAILHQQAKYYPFLREGYDKIKSLVTFRIPYFVGPLANGQSEFAWLTRKDDGEIRPWNIEEKVDFGKSAVDFIEKMTNKDTYLPKENVLPKHSLCYQKYMVYNELTKIRYIDDQGKTNYFSGREKQQIFNDLFKQKRKVKKKDLELFLRNINHIESPTIEGLEDSFNASYATYHDLLKVGLKQEILDNPLNTEILEDIVKILTVFEDKRMIKEQLEQFSDVLDGVVLKKLERRHYTGWGRLSAKLLVGIRDKQSHLTILDYLMNDDGLNRNLMQLINDSNLSFKSIIEKEQVSTTDKDLQSIVADLAGSPAIKKGILQSLKIVDELVSIMGYPPQTIVVEMARENQTTGKGKNNSKPRYKSLEKAIKDFGSQILKEHPTDNQELKNNRLYLYYLQNGKDIYTGQELDIHNLSNYDIDHIVPQSFITDNSIDNLVLTSSAGNREKGGDVPPLEIVRKRKVFWEKLYQGNLMSKRKFDYLTKAERGGLTEADKARFIHRQLVETRQITKNVANILHQRFNKETDNHGNTMEQVRIVTLKSALVSQFRKQFQLYKVREVNDYHHAHDAYLNGVVANTLLKVYPQLEPEFVYGEYHQFDWFKANKATAKKQFYTNIMLFFAQKERIIDENGEILWDKKYLETIKKVLDYRQINIVKKTEIQKGEFSKATIKPKGNSSKLIPRKENWDPVKYGGLDSPNMAYAVIIEHAKGKKKIVIEKKLIQINIMERKMFEKDEEAFLEEKGYHQPKVLTKLPKYTLYECEKGRRRMLSSANEAQKGNQLVLSNHLVSLLYHAKNCEASDGKSLKYIEAHRETFSELLAQVSEFATKYTLADANLSKINNLFEQNKEGDIKAIAQSFVDLMAFNAMGAPASFKFFEATIDRKRYTNLKELLSSTIIYQSITGLYESRKRLDD

SEQ ID NO: 243 - protein, 1334 aa, Listeria monocytogenes
MKKPYTIGLDIGTNSVGWAVLTDQYDLVKRKMKISGDSEKKQIKKNFWGVRLFEKGETAAKRRMSRTARRRIERRRNRISYLQEIFAIQMNEVDDNFFNRLKESFYAESDKKYNRHPFFGTVEEEVAYYKDFPTIYHLRKELIDSQKKADLRLVYLALAHIIKYRGHFLIEGALDTKNTSIDEMFKQFLQIYNQVFANDIEEASLKKTEKNQEVAQILAEKFTRKDKLDKILSLYPGEKTTGVFAQFVNIIVGSTGKFKKHFNLHEKKDINCAEDTYDTDLESLLAIIGDEFAEVFVAAKNAYNAVVLSNIITVTDSTTRAKLSASLIERFENHKEDLKKMKRFVRTYLPEKYDEIFDDTEKHGYAGYISGKTKQADFYKYMKATLEKIEGADYFIAKIEEENFLRKQRTFDNGVIPHQLHLEELEAILHQQAKYYPFLREDYEKIKSLVTFRIPYFVGPLAKGQSEFAWLTRKADGEIRPWNIEEKVDFGKSAVDFIEKMTNKDTYLPKENVLPKHSLCYQKYMVYNELTKVRYIDDQGKTNYFSGQEKQQIFNDLFKQKRKVKKKDLELFLRNINQIESPTIEGLEDSFNASYATYHDLLKVGMKQEILDNPLNTEMLEDIVKILTVFEDKRMIKEQLQQFSDVLDGTVLKKLERRHYTGWGRLSAKLLVGIRDKQSHLTILDYLMNDDGLNRNLMQLINDSNLSFKSIIEKEQVSTTDKDLQSIVAELAGSPAIKKGILQSLKIVDELVSVMGYPPQTIVVEMARENQTTNKGKNNSKPRYKSLEKAIKEFGSQILKEHPTDNQELKNNRLYLYYLQNGKDMYTGQELDIHNLSNYDIDHIVPQSFITDNSVDNLVLTSSAGNREKGDNVPPLEIVQKRKIFWEKLYQGNLMSKRKFDYLTKAERGGLTEADKARFIHRQLVETRQITKNVANILHQRFNYKTDGNKDTMETVRIVTLKSALVSQFRKQFQFYKVREVNDYHHAHDAYLNGVVANTLLKVYPQLEPEFVYGEYHQFGWFKANKATAKKQFYTNIMLFFAQKDRIIDENGEILWDKRYLETVKKVLGYRQMNIVKKTEIQKGEFSNVTPNPKGKSNKLIPRKKDWDPIKYGGFDGSKMAYAIIIEYEKQKRKVRIEKKLIQINIMEREAFEKDEKTFLEEKGYHQPKVLIKVPKYTLYECKNGRRRMLGSANEAHKGNQMLLPNHLMALLYHAEKYEAIDGESLAYIEVHRALFDELLAYISEFARKYTLSNDRLDEINMLYERNKDGDVKSIAESFVSLKKFNAFGVHQDFSFFGTKIERKRDRKLNELLNSTIIYQSITGLYESRKRLDN

SEQ ID NO: 244 - protein, 1334 aa, Listeria monocytogenes
MKNPYTIGLDIGTNSVGWAVLTDQYDLVKRKMKVAGNSDKKQIKKNFWGVRLFDEGETAADRRMNRTARRRIERRRNRISYLQEIFALEMANIDANFFCRLNDSFYVDSEKRNSRHPFFATIEEEVAYHKNYRTIYHLREELVNSSEKADLRLVYLALAHIIKYRGNFLIEGALDTKNTSVDGVYKQFIQTYNQVFISNIEEGTLAKMEENTTVADILAGKFTRKEKLERILQLYPGEKSTGMFAQFISLIVGSKGNFQKVFDLVEKTDIECAKDSYEEDLEALLAIIGDEYAELFVAAKNTYNAVVLSSIITVTDTETNAKLSASMIERFDAHEKDLSELKAFIKLHLPKQYEEIFSNVAIDGYAGYIDGKTKQVDFYKYLKTLLENIEGADYFIAKIEEENFLRKQRTFDNGAIPHQLHLEELEAILHQQAKYYPFLKEAYDKIKSLVTFRIPYFVGPLANGQSDFAWLTRKADGEIRPWNIEEKVDFGKSAVDFIEKMTNKDTYLPKENVLPKHSLYYQKYMVYNELTKVRYIDDQGKTNYFSGQEKQQIFNDYFKQKRKVSKKDLEQFLRNMSHIESPTIEGLEDSFNSSYATYHDLLKVGIKQEVLENPLNTEMLEDIVKILTVFEDKRMIKEQLQQFSDVLDGAVLKKLERRHYTGWGRLSAKLLVGIRDKQSHLTILDYLMNDDGLNRNLMQLINDSNLSFKSIIEKEQVSTTDKDLQSIVADLAGSPAIKKGILQSLKIVDELVSIMGYPPQTIVVEMARENQTTVKGKNNSRPRYKSLEKAIKEFGSQILKEHPTDNQELRNNRLYLYYLQNGKDMYTGQELDIHNLSNYDIDHIVPQSFITDNSIDNLVLTSSAGNREKGDDVPPLEIVRKRKVFWEKLFQGNLMSKRKFDYLTKAERGGLTEADKATFIHRQLVETRQITKNVANILHQRFNNETDNHGNNMEQVRIVMLKSALVSQFRKQFQLYKVREVNDYHHAHDAYLNGVVANTLLKVYPQLEPEFVYGEYHQFDWFKANKATAKKQFYTNIMLFFAQKERIIDENGEILWDKKYLETIKKVLDYRQMNIVKKTEIQKGEFSKATIKPKGNSSKLIPRKENWDPMKYGGLDSPNMAYAVIIEHAKGKKKVVFEKKIIRITIMERKAFEKDEKSFLEKQGYRQPKVLTKLPKYTLYECENGRRRMLASANEAQKGNQQVLKGQLITLLHHAKNCEASDGKSLDYIESNREMFGELLAHVSEFAKRYTLADANLSKINQLFEQNKDNDIKVIAQSFVNLMAFNAMGAPASFKFFEATIERKRYTNLKELLSATIIYQSITGLYEARKRLDG

SEQ ID NO: 245 - protein, 1334 aa, Listeria monocytogenes
MKNPYTIGLDIGTNSVGWAVLTNQYDLVKRKMKVAGNSDKKQIKKNFWGVRLFDDGQTAVDRRMNRTARRRIERRRNRISYLQEIFAVEMANIDANFFCRLNDSFYVDSEKRNSRHPFFATIEEEVAYHKNYRTIYHLREELVNSSEKADLRLVYLALAHIIKYRGNFLIEGALDTKNTSVDGVYEQFIQTYNQVFMSNIEEGTLAKVEENIEVANILAGKFTRREKFERILQLYPGEKSTGMFAQFISLIVGSKGNFQKVFDLIEKTDIECAKDSYEEDLEALLAIIGDEYAELFVAAKNTYNAVVLSSIITVTATETNAKLSASMIERFDAHEKDLGELKAFIKLHLPKQYQEIFNNAAIDGYAGYIDGKTKQVDFYKYLKTILENIEGADYFIAKIEEENFLRKQRTFDNGAIPHQLHLEELEAIIHQQAKYYPFLREDYEKIKSLVTFRIPYFVGPLAKGQSEFAWLTRKADGEIRPWNIEEKVDFGKSAVDFIEKMTNKDTYLPKENVLPKHSLCYQKYMVYNELTKVRYIDDQGKTNYFSGQEKQQIFNDLFKQKRKVKKKDLELFLRNINHIESPTIEGLEDSFNASYATYHDLLKVGMKQEILDNPLNTEMLEDIVKILTVFEDKPMIKEQLQQFSDVLDGGVLKKLERRHYTGWGRLSAKLLVGIREKQSHLTILDYLMNDDGLNRNLMQLINDSNLSFKSIIEKEQVSTTDKDLQSIVADLAGSPAIKKGILQSLKIVDELVSIMGYPPQTIVVEMARENQTTGKGKNNSKPRYKSLEKAIKEFGSKILKEHPTDNQELKNNRLYLYYLQNGKDMYTGQELDIHNLSNYDIDHIVPQSFITDNSIDNLVLTSSAGNREKGGDVPPLEIVRKRKVFWEKLYQGNLMSKRKFDYLTKAERGGLTDADKARFIHRQLVETRQITKNVANILHQRFNNETDNHGNTMEQVRIVTLKSALVSQFRKQFQLYKVREVNDYHHAHDAYLNGVVANTLLKVYPQLEPEFVYGEYHQFDWFKANKATAKKQFYTNIMLFFGQKERIIDENGEILWDKKYLETIKKVLDYRQMNIVKKTEIQKGEFSKATIKPKGNSSKLIPRKENWDPMKYGGLDSPNMAYAVIIEHAKGKKKLIFEKKIIRITIMERKMFEKDEEAFLEEKGYRHPKVLTKLPKYTLYECEKGRRRMLASANEAQKGNQLVLSNHLVSLLYHAKNCEASDGKSLKYIEAHRETFSELLAQVSEFATRYTLADANLSKINNLFEQNKEGDIQAIAQSFVDLMAFNAMGAPASFKFFEATIDRKRYTNLKELLSSTIIYQSITGLYESRKRLDD

SEQ ID NO: 246 - protein, 1334 aa, Listeria monocytogenes
MKNPYTIGLDIGTNSVGWAVLTNQYDLVKRKMKVAGNSDKKQIKKNFWGVRLFDDGQTAVDRRMNRTARRRIERRRNRISYLQEIFAVEMANIDANFFCRLNDSFYVDSEKRNSRHPFFATIEEEVAYHKNYRTIYHLREELVNSSEKADLRLVYLALAHIIKYRGNFLIEGALDTKNTSVDGVYEQFILTYNQVFMSNIEEGTLAKVEENIEVANILAGKFTRREKFERILQLYPGEKSTGMFAQFISLIVGSKGNFQKVFDLIEKTDIECAKDSYEEDLETLLAIIGDEYAELFVAAKNTYNAVVLSSIITVTDTETNAKLSASMIERFDAHEKDLVELKAFIKLNLPKQYEEIFSNAAIDGYAGYIDGKTKQVDFYKYLKTTLENVEGADYFITKIEEENFLRKQRTFDNGVIPHQLHLEELEAILHQQAKYYPFLREDYEKIKSLVTFRIPYFVGPLAKGQSEFAWLTRKADGEIRPWNIEEKVDFGKSAVDFIEKMTNKDTYLPKENVLPKHSLCYQKYMVYNELTKIRYIDDQGKTNYFSGQEKQQIFNDLFKQKRKVKKKDLELFLRNINHVESPTIEGLEDSFNASYATYHDLMKVGIKQEILDNPLNTEMLEDIVKILTVFEDKRMIKEQLQQFSDVLDGTVLKKLERRHYTGWGRLSAKLLVGIRDKQSHLTILDYLMNDDGLNRNLMQLINDSNLSFKSIIEKEQVSTADKDLQSIVADLAGSPAIKKGILQSLKVVEELVSVMGYPPQTIVVEMARENQTTNKGKNNSKPRYKSLEKAIKEFGSQILKEHPTDNQELKNNRLYLYYLQNGKDMYTGQELDIHNLSNYDIDHIVPQSFITDNSIDNLVLTSSAGNREKGDNVPPLEIVQKRKIFWEKLYQGNLMSKRKFDYLTKAERGGLTEADKARFIHRQLVETRQITKNVANILHQRFNYKTDDNEDTMEPVRIVTLKSALVSQFRKQFQLYKVREVNDYHHAHDAYLNGVVANTLLKVYPQLEPEFVYGEYHQFDWFKANKATAKKQFYTNIMLFFAQKERIIDENGEILWDKKYLETIKKVLNYRQMNIVKKTEIQKGEFSNQNPKPRGDSSKLIPKKTNLNPIKYGGFEGSNMAYAIIIEHEKRKKKVTIEKKLIQINIMERKAFEKDEKVFLEGKGYHQPKVLTKLPKYALYECENGRRRMLGSANEVHKGNQMLLPNHLMTLLYHAEKREAIDGESLAYIEAHKAVFGELLAHISEFARKYTLANDKLDEINMLYERNKDGDVKSIAESFVSLKKFNAFGVHKDFNFFGTTIKRKRDRKLKELLNSTIIYQSITGLYESRKRLDS

SEQ ID NO: 247 - protein, 1334 aa, Listeria monocytogenes
MKNPYTIGLDIGTNSVGWAVLTDQYDLVKRKMKVAGNSDKKQIKKNFWGVRLFDDGQTAVDRRMNRTARRRIERRRNRISYLQEIFAVEMANIDANFFCRLNDSFYVDSEKRNSRHPFFATIEEEVAYHKNYRTIYHLREELVNSSEKADLRLVYLALAHIIKYRGNFLIEGALDTKNTSVDGVYEQFIQTYNQVFMSNIEEGTLAKVEENIEVANILAGKFTRREKFERILQLYPGEKSTGMFAQFISLIVGSKGNFQKVFDLIEKTDIECAKDSYEEDLETLLAIIGDEYAELFVAAKNTYNAVVLSSIITVNDTETNAKLSASMIERFDAHEKDLVELKAFIKLNLPKQYEEIFSNAAIDGYAGYIDGKTKQVDFYKYLKTILENIEGSDYFIAKIEEENFLRKQRTFDNGAIPHQLHLEELEAIIHQQAKYYTFLKEDYDKIKSLVTFRIPYFVGPLANGQSEFAWLTRKADGEIRPWNIEEKVDFGKSAVDFIEKMTNKDTYLPKENVLPKHSLCYQKYMVYNELTKVRYIDDQGKTNYFSGQEKQQIFNDLFKQKRKVKKKDLELFLRNINQIESPTIEGLEDSFNASYATYHDLLKVGMKQEILDNPLNTEMLEDIVKILTVFEDKRMIKEQLQQFSDVLDGVVLKKLERRHYTGWGRLSAKLLVGIRDKQSHLTILEYLMNDDGLNRNLMQLINDSNLSFKSIIEKEQVSTTDKDLQSIVAELAGSPAIKKGILQSLKIVDELVSIMGYPPQTIVVEMARENQTTGKGKNNSKPRYKSLEKAIKEFGSQILKEHPTDNQELKNNRLYLYYLQNGKDMYTGQELDIHNLSNYDIDHIVPQSFITDNSIDNLVLTSSAGNREKGGDVPPLEIVRKRKVFWEKLYQGNLMSKRKFDYLTKAERGGLTEADKARFIHRQLVETRQITKNVANILHQRFNKETDNHGNTMEQVRIVTLKSALVSQFRKQFQLYKVREVNDYHHAHDAYLNGVVANTLLKVYPQLEPEFVYGEYHQFDWFKANKATAKKQFYTNIMLFFAQKERIIDENGEILWDKKYLETIKKVLDYRQMNIVKKTEIQKGEFSKATIKPKGNSSKLIPRKENWDPMKYGGLDSPNMAYAVIIEHAKGKKRIVIEKKLIQINIMERKMFEKDEEAFLEEKGYRHPKVLTKLPKYTLYECEKGRRRMLASANEAQKGNQLVLSNHLVSLLYHAKNCEASDGKSLKYIEAHRETFSELLAQVSEFATRYTLADANLSKINNLFEQNKEGDIKAIAQSFVDLMAFNAMGAPASFKFFEATIDRKRYTNLKELLSSTIIYQSITGLYESRKRLDD

SEQ ID NO: 248 - protein, 1334 aa, Listeria monocytogenes
MKKPYTIGLDIGTNSVGWAVLTDQYDLVKRKMKISGDSEKKQIKKNFWGVRLFEKGETAAKRRMSRTARRRIERRRNRISYLQEIFAIQMNEVDDNFFNRLKESFYAESDKKYNRHPFFGTVEEEVAYYKDFPTIYHLRKELIDSQKKADLRLVYLALAHIIKYRGHFLIEGALDTKNTSIDEMFKQFLQIYNQVFANDIEEASLKKTEKNQEVAQILAEKFTRKDKLDKILSLYPGEKTTGVFAQFVNIIVGSTGKFKKHFNLHEKKDINCAEDTYDTDLESLLAIIGDEFAEVFVAAKNAYNAVVLSNIITVTDSTTRAKLSASLIERFENHKEDLKKMKRFVRTYLPEKYDEIFDDTEKHGYAGYISGKTKQADFYKYMKATLEKIEGADYFIAKIEEENFLRKQRTFDNGVIPHQLHLEELEAILHQQAKYYPFLREDYEKIKSLVTFRIPYFVGPLAKGQSEFAWLTRKADGEIRPWNIEEKVDFGKSAVDFIEKMTNKDTYLPKENVLPKHSLCYQKYMVYNELTKVRYIDDQGKTNYFSGQEKQQIFNDLFKQKRKVKKKDLELFLRNINQIESPTIEGLEDSFNASYATYHDLLKVGMKQEILDNPLNTEMLEDIVKILTVFEDKRMIKEQLQQFSDVLDGTVLKKLERRHYTGWGRLSAKLLVGIRDKQSHLTILDYLMNDDGLNRNLMQLINDSNLSFKSIIEKEQVSTADKDLQSIVADLAGSPAIKKGILQSLKIVDELVSVMGYPPQTIVVEMARENQTTNKGKNNSKPRYKSLEKAIKEFGSQILKEHPTDNQELKNNRLYLYYLQNGKDMYTGQELDIHNLSNYDIDHIVPQSFITDNSVDNLVLTSSAGNREKGDNVPPLEIVQKRKIFWEKLYQGNLMSKRKFDYLTKAERGGLTEADKARFIHRQLVETRQITKNVANILHQRFNYKTDGNKDTMETVRIVTLKSALVSQFRKQFQFYKVREVNDYHHAHDAYLNGVVANTLLKVYPQLEPEFVYGEYHQFDWFKANKATAKKQFYTNIMLFFAQKDRIIDENGEILWDKRYLETVKKVLGYRQMNIVKKTEIQKGEFSNVTPNPKGKSNKLIPRKKDWDPIKYGGFDGSKMAYAIIIEYEKQKRKVRIEKKLIQINIMEREAFEKDEKTFLEEKGYHQPKVLIKVPKYTLYECENGRRRMLGSANEAHKGNQMLLPNHLMALLYHAEKYEAIDGESLAYIEVHRALFDELLAYISEFARKYTLSNDRLDEINMLYERNKDGDVKSIAESFVSLKKFNAFGVHQDFSFFGTKIERKRDRKLNELLNSTIIYQSITGLYESRKRLDN

SEQ ID NO: 249 - protein, 1334 aa, Listeria monocytogenes
MKNPYTIGLDIGTNSVGWAVLTNQYDLVKRKMKVAGNSDKKQIKKNFWGVRLFDDGQTAVDRRMNRTARRRIERRRNRISYLQEIFAVEMANIDANFFCRLNDSFYVDSEKRNSRHPFFATIEEEVAYHKNYRTIYHLREELVNSSEKADLRLVYLALAHIIKYRGNFLIEGALDTKNTSVDGVYEQFIQTYNQVFMSNIEEGTLAKVEENIEVANILARKFTRREKFERILQLYPGEKSTGMFAQFISLIVGSKGNFQKVFDLIEKTDIECAKDSYEEDLETLLAIIGDEYAELFVAAKNTYNAVVLSSIITVTDTETNAKLSASMIERFDAHEKDLVELKAFIKLNLPKQYEEIFSNAAIDGYAGYIDGKTKQVDFYKYLKTILENIEGADYFIAKIEEENFLRKQRTFDNGAIPHQLHLEELEAIIHQQAKYYPFLREDYEKIKSLVTFRIPYFVGPLAKGQSEFAWLTRKADGEIRPWNIEEKVDFGKSAVDFIEKMTNKDTYLPKENVLPKHSLCYQKYMVYNELTKIRYIDDQGKTNYFSGQEKQQIFNDLFKQKRKVKKKDLELFLRNINHVESPTIEGLEDSFNASYATYHDLMKVGIKQEILDNPLNTEMLEDIVKILTVFEDKRMIKEQLQQFSDVLDGTVLKKLERRHYTGWGRLSAKLLVGIRDKQSHLTILDYLMNDDGLNRNLMQLINDSNLSFKSIIEKEQVSTADKDLQSIVADLAGSPAIKKGILQSLKVVEELVSVMGYPPQTIVVEMARENQTTNKGKNNSKPRYKSLEKAIKEFGSQILKEHPTDNQELKNNRLYLYYLQNGKDMYTGQELDIHNLSNYDIDHIVPQSFITDNSIDNLVLTSSAGNREKGDNVPPLEIVQKRKIFWEKLYQGNLMSKRKFDYLTKAERGGLTEADKARFIHRQLVETRQITKNVANILHQRFNYKTDDNEDTMEPVRIVTLKSALVSQFRKQFQLYKVREVNDYHHAHDAYLNGVVANTLLKVYPQLEPEFVYGEYHQFDWFKANKATAKKQFYTNIMLFFAQKERIIDENGEILWDKKYLETIKKVLNYRQMNIVKKTEIQKGEFSNQNPKPRGDSSKLIPKKTNLNPIKYGGFEGSNMAYAIIIEHEKRKKKVTIEKKLIQINIMERKAFEKDEKVFLEGKGYHQPKVLTKLPKYALYECENGRRRMLGSANEVHKGNQMLLPNHLMTLLYHAEKREAIDGESLAYIEAHKAVFGELLAHISEFARKYTLANDKLDEINMLYERNKDGDVKSIAESFVSLKKFNAFGVHKDFNFFGTTIKRKRDRKLKELLNSTIIYQSITGLYESRKRLDS

SEQ ID NO: 250 - protein, 1337 aa, Listeria monocytogenes
MKNMKNPYTIGLDIGTNSVGWAVLTNQYDLVKRKMKVAGNSDKKQIKKNFWGVRLFDDGQTAVDRRMNRTARRRIERRRNRISYLQEIFAVEMANIDANFFCRLNDSFYVDSEKRNSRHPFFATIEEEVAYHKNYRTIYHLREELVNSSEKADLRLVYLALAHIIKYRGNFLIEGALDTKNTSVDGVYEQFIQTYNQVFMSNIEEGTLAKVEENIEVANILAGKFTRREKFERILQLYPGEKSTGMFAQFISLIVGSKGNFQKVFDLIEKTDIECAKDSYEEDLEALLAIIGDEYAELFVAAKNTYNAVVLSSIITVTATETNAKLSASMIERFDAHEKDLGELKAFIKLHLPKQYQEIFNNAAIDGYAGYIDGKTKQVDFYKYLKTILENIEGADYFIAKIEEENFLRKQRTFDNGAIPHQLHLEELEAIIHQQAKYYPFLREDYEKIKSLVTFRIPYFVGPLAKGQSEFAWLTRKADGEIRPWNIEEKVDFGKSAVDFIEKMTNKDTYLPKENVLPKHSLCYQKYMVYNELTKVRYIDDQGKTNYFSGQEKQQIFNDLFKQKRKVKKKDLELFLRNINHIESPTIEGLEDSFNASYATYHDLLKVGMKQEILDNPLNTEMLEDIVKILTVFEDKPMIKEQLQQFSDVLDGGVLKKLERRHYTGWGRLSAKLLVGIREKQSHLTILDYLMNDDGLNRNLMQLINDSNLSFKSIIEKEQVSTTDKDLQSIVADLAGSPAIKKGILQSLKIVDELVSIMGYPPQTIVVEMARENQTTGKGKNNSKPRYKSLEKAIKEFGSKILKEHPTDNQELKNNRLYLYYLQNGKDMYTGQELDIHNLSNYDIDHIVPQSFITDNSIDNLVLTSSAGNREKGGDVPPLEIVRKRKVFWEKLYQGNLMSKRKFDYLTKAERGGLTDADKARFIHRQLVETRQITKNVANILHQRFNNETDNHGNTMEQVRIVTLKSALVSQFRKQFQLYKVREVNDYHHAHDAYLNGVVANTLLKVYPQLEPEFVYGEYHQFDWFKANKATAKKQFYTNIMLFFGQKERIIDENGEILWDKKYLETIKKVLDYRQMNIVKKTEIQKGEFSKATIKPKGNSSKLIPRKENWDPMKYGGLDSPNMAYAVIIEHAKGKKKLIFEKKIIRITIMERKMFEKDEEAFLEEKGYRHPKVLTKLPKYTLYECEKGRRRMLASANEAQKGNQLVLSNHLVSLLYHAKNCEASDGKSLKYIEAHRETFSELLAQVSEFATRYTLADANLSKINNLFEQNKEGDIQAIAQSFVDLMAFNAMGAPASFKFFEATIDRKRYTNLKELLSSTIIYQSITGLYESRKRLDD

SEQ ID NO: 251 - protein, 1337 aa, Listeria monocytogenes
MKNMKNPYTIGLDIGTNSVGWAVLTNQYDLVKRKMKVAGNSDKKQIKKNFWGVRLFDDGQTAVDRRMNRTARRRIERRRNRISYLQEIFAVEMANIDANFFCRLNDSFYVDSEKRNSRHPFFATIEEEVAYHKNYRTIYHLREELVNSSEKADLRLVYLALAHIIKYRGNFLIEGALDTKNTSVDGVYEQFIQTYNQVFMSNIEEGTLAKVEENIEVANILARKFTRREKFERILQLYPGEKSTGMFAQFISLIVGSKGNFQKVFDLIEKTDIECAKDSYEEDLETLLAIIGDEYAELFVAAKNTYNAVVLSSIITVTDTETNAKLSASMIERFDAHEKDLVELKAFIKLNLPKQYEEIFSNAAIDGYAGYIDGKTKQVDFYKYLKTILENIEGADYFIAKIEEENFLRKQRTFDNGAIPHQLHLEELEAIIHQQAKYYPFLREDYEKIKSLVTFRIPYFVGPLAKGQSEFAWLTRKADGEIRPWNIEEKVDFGKSAVDFIEKMTNKDTYLPKENVLPKHSLCYQKYMVYNELTKIRYIDDQGKTNYFSGQEKQQIFNDLFKQKRKVKKKDLELFLRNINHVESPTIEGLEDSFNASYATYHDLMKVGIKQEILDNPLNTEMLEDIVKILTVFEDKRMIKEQLQQFSDVLDGTVLKKLERRHYTGWGRLSAKLLVGIRDKQSHLTILDYLMNDDGLNRNLMQLINDSNLSFKSIIEKEQVSTADKDLQSIVADLAGSPAIKKGILQSLKVVEELVSVMGYPPQTIVVEMARENQTTNKGKNNSKPRYKSLEKAIKEFGSQILKEHPTDNQELKNNRLYLYYLQNGKDMYTGQELDIHNLSNYDIDHIVPQSFITDNSIDNLVLTSSAGNREKGDNVPPLEIVQKRKIFWEKLYQGNLMSKRKFDYLTKAERGGLTEADKARFIHRQLVETRQITKNVANILHQRFNYKTDDNEDTMEPVRIVTLKSALVSQFRKQFQLYKVREVNDYHHAHDAYLNGVVANTLLKVYPQLEPEFVYGEYHQFDWFKANKATAKKQFYTNIMLFFAQKERIIDENGEILWDKKYLETIKKVLNYRQMNIVKKTEIQKGEFSNQNPKPRGDSSKLIPKKTNLNPIKYGGFEGSNMAYAIIIEHEKRKKKVTIEKKLIQINIMERKAFEKDEKVFLEGKGYHQPKVLTKLPKYALYECENGRRRMLGSANEVHKGNQMLLPNHLMTLLYHAEKREAIDGESLAYIEAHKAVFGELLAHISEFARKYTLANDKLDEINMLYERNKDGDVKSIAESFVSLKKFNAFGVHKDFNFFGTTIKRKRDRKLKELLNSTIIYQSITGLYESRKRLDS

SEQ ID NO: 252 - protein, 782 aa, Listeria monocytogenes FSL F2-208
  misc_feature (722)..(722): Xaa can be any naturally occurring amino acid
IFNDLFKQKRKVKKKDLELFLRNINQIESPTIEGLEDSFNASYATYHDLLKVGMKQEILDNPLNTEMLEDIVKILTVFEDKRMIKEQLQQFSDVLDGVVLKKLERRHYTGWGRLSAKLLVGIRDKQSHLTILEYLMNDDGLNRNLMQLINDSNLSFKSIIEKEQVSTTDKDLQSIVADLAGSPAIKKGILQSLKIVDELVSIMGYPPQTIVVEMARENQTTVKGKNNSRPRYKSLEKAIKEFGSQILKEHPTDNQELKNNRLYLYYLQNGKDIYTGQELDIHNLSNYDIDHIVPQSFITDNSIDNLVLTSSAGNREKGDDVPPLEIVRKRKVFWEKLYQGNLMSKRKFDYLTKAERGGLTEADKARFIHRQLVETRQITKNVANILHQRFNNETDNHGNTMEQVRIVTLKSALVSQFRKQFQLYKVREVNDYHHAHDAYLNGVVANTLLKVYPQLEPEFVYGEYHQFDWFKANKATAKKQFYTNIMLFFAQKERIIDENGEILWDKKYLETIKKVLDYRQMNIVKKTEIQKGEFSKATIKPKGNSSKLIPRKENWDPMKYGGLDSPNMAYAVIIEHAKGKKKIVIEKKLIQINIMERKMFEKDEEAFLEEKGYRHPKVLTKLPKYTLYECEKGRRRMLASANEAQKGNQLVLSNHLVSLLYHAKNCEASDGKSLKYTEAHRETFSELLAQVSEFATRYTLADANLSKINNLFEQNKEGDIKXIAQSFVDLMVFNAMGAPASFKFFEATIDRKRYTNLKELLSSTIIYQSITGLYESRKRLDD

SEQ ID NO: 253 - protein, 1334 aa, Listeria seeligeri
MKKPYTIGLDIGTNSVGWAALTDQYDLVKRKMKVAGNSEKKQIKKNLWGVRLVDEGKTAAHRRVNRTTRRRIERRRNRISYLQEIFTAEMFEVDANFFYRLEDSFYIESEKRQSRHPFFATIEEEVAYHENYRTIYHLREKLVNSSDKADLRLVYLALAHIIKYRGNFLIEGKLDTKNTSVDEVFKQFIKTYNQVFASDIEEGSLTRIEENNEVAKIFSEKLTKREKLDKILNLYPNEKSTDLFAQFISLIIGSKGNFKKFFNLTEKTDIECAKDSYEEDLEVLLARVGDEYAEIFVAAKNAYNAVVLSSIITVSNTETKAKLSASMIERFDKHDKDLKRMKAFFKVRLPENFNEVFNDVEKDGYAGYIEGKTKQEAFYKYMKKMLEHVEGADYFINQIEEENFLRKQRTFDNGAIPHQLHLEELEAILHQQAKYYPFLKVDYEKIKSLVTFRIPYFVGPLANGQSEFSWLTRKADGEIRPWNIEEKVDFGKSAIDFIEKMTNKDTYLPKENVLPKHSMCYQKYMVYNELTKIRYTDDQGKTHYFSGQEKQQIFNDLFKQKRKVKKKDLELFLYNMNHVESPTVEGVEDAFNSSFTTYHDLQKVGVPQEILDDPLNTEMLEEIIKILTVFEDKRMINERLQEFSNVLDEAVLKKLERRHYTGWGRLSAKLLIGIRDKESHLTILDYLMNDDKHNRNLMQLINDSNLSFKSIIEKEQVSTADKDIQSIVADLAGSPAIKKGILQSLKIVDELVGIMGYPPQTIVVEMARENQTTGKGKNNSKPRFTSLEKAIKELGSQILKEHPTDNQGLKNDRLYLYYLQNGKDMYTGQELDIHNLSNYDIDHVVPQSFITDNSIDNRVLASSAANREKGDNVPSLEVVRKRKVYWEKLYQAKLMSKRKFDYLTKAERGGLTEADKARFIHRQLVETRQITKNVANILHQRFNCKKDESGNVIEQVRIVTLKAALVSQFRKQFQLYKVREVNDYHHAHDAYLNCVVANTLLKVYPQLEPEFVYGDYHQFDWFKANKATAKKQFYTNIMLFFAKKDRIIDENGEILWDKKYLDTIKKVLNYRQMNIVKKTEIQKGEFSNATANPKGNSSKLIPRKADWDPIKYGGFDGSNMAYAIVIEHEKRKKKTVIKKELIQINIMERTAFEKDQKEFLEGKGYRNPKVITKIPKYTLYECENGRRRMLGSANEAQKGNQMVLPNHLMTLLYHAKNCEASDGKSLAYIESHREMFAELLDSISEFASRYTLADANLEKINTIFEQNKSGDVKVIAQSFVNLLEFNAMGAPASFKYFETNIERKRYNNLKELLNATIIYQSITGLYEARKRLDD

SEQ ID NO: 254 - protein, 1400 aa, Artificial Sequence
  Synthetic polypeptide
MAPKKKRKVGIHGVPAADKKYSIGLDIGTNSVGWAVITDEYKVPSKKFKVLGNTDRHSIKKNLIGALLFDSGETAEATRLKRTARRRYTRRKNRICYLQEIFSNEMAKVDDSFFHRLEESFLVEEDKKHERHPIFGNIVDEVAYHEKYPTIYHLRKKLVDSTDKADLRLIYLALAHMIKFRGHFLIEGDLNPDNSDVDKLFIQLVQTYNQLFEENPINASGVDAKAILSARLSKSRRLENLIAQLPGEKKNGLFGNLIALSLGLTPNFKSNFDLAEDAKLQLSKDTYDDDLDNLLAQIGDQYADLFLAAKNLSDAILLSDILRVNTEITKAPLSASMIKRYDEHHQDLTLLKALVRQQLPEKYKEIFFDQSKNGYAGYIDGGASQEEFYKFIKPILEKMDGTEELLVKLNREDLLRKQRTFDNGSIPHQIHLGELHAILRRQEDFYPFLKDNREKIEKILTFRIPYYVGPLARGNSRFAWMTRKSEETITPWNFEEVVDKGASAQSFIERMTNFDKNLPNEKVLPKHSLLYEYFTVYNELTKVKYVTEGMRKPAFLSGEQKKAIVDLLFKTNRKVTVKQLKEDYFKKIECFDSVEISGVEDRFNASLGTYHDLLKIIKDKDFLDNEENEDILEDIVLTLTLFEDREMIEERLKTYAHLFDDKVMKQLKRRRYTGWGRLSRKLINGIRDKQSGKTILDFLKSDGFANRNFMQLIHDDSLTFKEDIQKAQVSGQGDSLHEHIANLAGSPAIKKGILQTVKVVDELVKVMGRHKPENIVIEMARENQTTQKGQKNSRERMKRIEEGIKELGSQILKEHPVENTQLQNEKLYLYYLQNGRDMYVDQELDINRLSDYDVDHIVPQSFLKDDSIDNKVLTRSDKNRGKSDNVPSEEVVKKMKNYWRQLLNAKLITQRKFDNLTKAERGGLSELDKAGFIKRQLVETRQITKHVAQILDSRMNTKYDENDKLIREVKVITLKSKLVSDFRKDFQFYKVREINNYHHAHDAYLNAVVGTALIKKYPKLESEFVYGDYKVYDVRKMIAKSEQEIGKATAKYFFYSNIMNFFKTEITLANGEIRKRPLIETNGETGEIVWDKGRDFATVRKVLSMPQVNIVKKTEVQTGGFSKESILPKRNSDKLIARKKDWDPKKYGGFDSPTVAYSVLVVAKVEKGKSKKLKSVKELLGITIMERSSFEKNPIDFLEAKGYKEVKKDLIIKLPKYSLFELENGRKRMLASAGELQKGNELALPSKYVNFLYLASHYEKLKGSPEDNEQKQLFVEQHKHYLDEIIEQISEFSKRVILADANLDKVLSAYNKHRDKPIREQAENIIHLFTLTNLGAPAAFKYFDTTIDRKRYTSTKEVLDATLIHQSITGLYETRIDLSQLGGDKRPAATKKAGQAKKKK

SEQ ID NO: 255 - protein, 1333 aa, Roseburia hominis
MSQNIVDYCIGLDLGTGSVGWAVVDMNHRLMKRNGKHLWGSRLFSNAETAATRRSSRSIRRRYNKRRERIRLLRAILQDMVLEKDPTFFIRLEHTSFLDEEDKAKYLGTDYKDNYNLFIDEDFNDYTYYHKYPTIYHLRKALCESTEKADPRLIYLALHHIVKYRGNFLYEGQKFNMDASNIEDKLSDVFTQFADFNNIPYEDDEKKNLEILEILKKPLSKKAKVDEVMALISPEKEFKSAYKELVTGIAGNKMNVTKMILCESIKQGDSEIKLKFSDSNYDDQFSEVENDLGEYVEFIDSLHNIYSWVELQTIMGATHTDNASISEAMVSRYNKHHEDLQLLKKCIKDNVPKKYFDMFRNDSEKVKGYYNYINRPNKAPVDEFYKFVKKCIEKVDTPEAKQILHDIELENFLLKQNSRTNGSVPYQMQLDEMIKIIDNQAKYYPVLKEKREQLLSILTFRIPYYFGPLNETSEHAWIKRLEGKENQRILPWNYQDTVDVDATAEGFIKRMRSYCTYFPDEEVLPKNSLIVSKYEVYNELNKIRVDDKLLEVDVKNDIYNELFMKNKTVTEKKLKNWLVNNQCCRKDAEIKGFQKENQFSTSLTPWIDFTNIFGKIDQSNFDLIEKIIYDLTVFEDKKIMKRRLKKKYALPDDKIKQILKLKYKDWSRLSKKLLDGIVADNRFGSSVTVLDVLEMSRLNLMEIINDKELGYAQMIEEASSCPKDGKFTYEEVAKLAGSPALKRGIWQSLQIVEEITKVMKCRPKYIYIEFERSEEAKERTESKIKKLENVYKDLDEQTKKEYKSVLEELKGFDNTKKISSDSLFLYFTQLGKCMYSGKKLDIDSLDKYQIDHIVPQSLVKDDSFDNRVLVLPSENQRKLDDLVVPFDIRDKMYRFWKLLFDHELISPKKFYSLIKTEYTERDEERFINRQLVETRQITKNVTQIIEDHYSTTKVAAIRANLSHEFRVKNHIYKNRDINDYHHAHDAYIVALIGGFMRDRYPNMHDSKAVYSEYMKMFRKNKNDQKKWKDGFVINSMNYPYEVDGKLIWNPDLINEIKKCFYYKDCYCTTKLDQKSGQMFNLTVLPNDAHSAKGTTEAVIPVNKNRKDVNKYGGFSGLQYVIAAIEGTKKKGKKLVKVRKLSGIPLYLKQADIKEQIEYVEKEEKLSDVKIIKNNIPLNQLIEIDGRQYLLTSPTECVNAMQLVLNEEQCKLIADIYNAIYKQDFDGLDNMLMIQLYLQLIDKLKTLYPIYMGIVEKFEKLTEDFVSISKEEKANVIKQMLIIMHKGPQNGNIIYDDFNVGKRIGRLNGRTFYLDNIEFISQSPTGIYTKKYKL

SEQ ID NO: 256 - protein, 1335 aa, Sharpea azabuensis
MAKNKDIRYSIGLDIGTNSVGWAVMDEHYELLKKGNHHMWGSRLFDAAEPAATRRASRSIRRRYNKRRERIRLLRDLLGDMVMEVDPTFFIRLLNVSFLDEEDKQKNLGNDYKDNYNLFIEKDFNDKTYYDKYPTIYHLRKELCENKEKADPRLIYLALHHIVKYRGNFLYEGQSFTMDNSDIEERLNSAIEKFMSINEFDNRIVESDINSMIAVLSKIYQRSKKADDLLKIMNPTKEEKAAYKEFTKALVGLKFNISKMILAQEVKKGDTDIVLEFSNANYDSTIDELQSELGEYIEFIEMLHNIYSWVELQAILGATHTDNPSISAAMVERYEEHKKDLRVLKKVIREELPDKYNEVFRKDNRKLHNYLGYIKYPKDTPVEEFYKYIKGLLAKVDTDEAREILERIDLEKFMLKQNSRTNGSIPYQMQKDEMIQIIDNQSVYYPQLKENRDKLISILEFRIPYYFGPLNAHSEFAWIKKFEDKQKERILPWNYDQIVDIDATAEGFIERMKNTGTYFPDEPVMAKNSLTVSKFEVLNELNKIRINGKLIAVETKKELLSDLFMKNKTITDKKLKDWLVTHQYYDINEELKIEGYQKDLQFSTSLAPWIDFTKIFGEINASNYQLIEKIIYDISIFEDKKILKRRLKKVYQLDDLLVDKILKLNYTGWSRLSEKLLTGMTADNEFGSKATVLFVLENSNKNLMEIINDEKLGYKQIIEESNMQDIEGPFKYDEVKKLAGSPAIKRGIWQALLVVREITKFMKHEPSHIYIEFAREEQEKVRKESKIAKLQKIYENLNLQTKEDQQVYESLKKEDAKKRMETDALYLYYLQMGKSMYSGKPLDIDKLSTYQIDHILPQSLIKDDSFDNRVLVLPEENQWKLDSETVPFEIRNKMIGFWQMLHENGLMSNKKFFSLIRTDFSDKDKERFINRQLVETRQIIKNVAVIINDHYTNTNIVTVRAELSHQFRERYKIYKNRDINDFHHAHDAYIACIVGQFMHQNFEHLDAKIIYGQYKKNYKKDVKHHNNYGFILNSMNHLQSDIDTGEVMWDPAKIGKIKSCFYYKDVYVTKKLEQNSGTLFNVTVLPNDAHSEKGITAATVPLNKYRADVHKYGGFGNVQSIIVAIEGKKKKGKKLIDVRKLTSIPLHLKNAPVEEQLSYIASPEHEDLIDVRIVKEILKNQLIEIDGGLYYVTSPTEYVTARQLSLNEQSCKLISEIYAAMLKKRYEYLDEEEIFDLYLQLLQKMDTLYPAYKGIAKRFFDRAEDFKNIDVVEKCDVIKQILIIMHAGPMNGNIMYDDFKFTNRIGRFTHKNIDLNKTTFISTSVTGLFSKKYKL

SEQ ID NO: 257 - protein, 1417 aa, Artificial Sequence
  Synthetic polypeptide
MDYKDDDDKDYKDDDDKMAPKKKRKVGIHGVPAADKKYSIGLDIGTNSVGWAVITDEYKVPSKKFKVLGNTDRHSIKKNLIGALLFDSGETAEATRLKRTARRRYTRRKNRICYLQEIFSNEMAKVDDSFFHRLEESFLVEEDKKHERHPIFGNIVDEVAYHEKYPTIYHLRKKLVDSTDKADLRLIYLALAHMIKFRGHFLIEGDLNPDNSDVDKLFIQLVQTYNQLFEENPINASGVDAKAILSARLSKSRRLENLIAQLPGEKKNGLFGNLIALSLGLTPNFKSNFDLAEDAKLQLSKDTYDDDLDNLLAQIGDQYADLFLAAKNLSDAILLSDILRVNTEITKAPLSASMIKRYDEHHQDLTLLKALVRQQLPEKYKEIFFDQSKNGYAGYIDGGASQEEFYKFIKPILEKMDGTEELLVKLNREDLLRKQRTFDNGSIPHQIHLGELHAILRRQEDFYPFLKDNREKIEKILTFRIPYYVGPLARGNSRFAWMTRKSEETITPWNFEEVVDKGASAQSFIERMTNFDKNLPNEKVLPKHSLLYEYFTVYNELTKVKYVTEGMRKPAFLSGEQKKAIVDLLFKTNRKVTVKQLKEDYFKKIECFDSVEISGVEDRFNASLGTYHDLLKIIKDKDFLDNEENEDILEDIVLTLTLFEDREMIEERLKTYAHLFDDKVMKQLKRRRYTGWGRLSRKLINGIRDKQSGKTILDFLKSDGFANRNFMQLIHDDSLTFKEDIQKAQVSGQGDSLHEHIANLAGSPAIKKGILQTVKVVDELVKVMGRHKPENIVIEMARENQTTQKGQKNSRERMKRIEEGIKELGSQILKEHPVENTQLQNEKLYLYYLQNGRDMYVDQELDINRLSDYDVDHIVPQSFLKDDSIDNKVLTRSDKNRGKSDNVPSEEVVKKMKNYWRQLLNAKLITQRKFDNLTKAERGGLSELDKAGFIKRQLVETRQITKHVAQILDSRMNTKYDENDKLIREVKVITLKSKLVSDFRKDFQFYKVREINNYHHAHDAYLNAVVGTALIKKYPKLESEFVYGDYKVYDVRKMIAKSEQEIGKATAKYFFYSNIMNFFKTEITLANGEIRKRPLIETNGETGEIVWDKGRDFATVRKVLSMPQVNIVKKTEVQTGGFSKESILPKRNSDKLIARKKDWDPKKYGGFDSPTVAYSVLVVAKVEKGKSKKLKSVKELLGITIMERSSFEKNPIDFLEAKGYKEVKKDLIIKLPKYSLFELENGRKRMLASAGELQKGNELALPSKYVNFLYLASHYEKLKGSPEDNEQKQLFVEQHKHYLDEIIEQISEFSKRVILADANLDKVLSAYNKHRDKPIREQAENIIHLFTLTNLGAPAAFKYFDTTIDRKRYTSTKEVLDATLIHQSITGLYETRIDLSQLGGDKRPAATKKAGQAKKKK

SEQ ID NO: 258 - protein, 1368 aa, Artificial Sequence; identical to SEQ ID NO: 2
  Synthetic polypeptide

SEQ ID NO: 259 - protein, 1376 aa, Artificial Sequence
  Synthetic polypeptide
MDKKYSIGLDIGTNSVGWAVITDEYKVPSKKFKVLGNTDRHSIKKNLIGALLFDSGETAEATRLKRTARRRYTRRKNRICYLQEIFSNEMAKVDDSFFHRLEESFLVEEDKKHERHPIFGNIVDEVAYHEKYPTIYHLRKKLVDSTDKADLRLIYLALAHMIKFRGHFLIEGDLNPDNSDVDKLFIQLVQTYNQLFEENPINASGVDAKAILSARLSKSRRLENLIAQLPGEKKNGLFGNLIALSLGLTPNFKSNFDLAEDAKLQLSKDTYDDDLDNLLAQIGDQYADLFLAAKNLSDAILLSDILRVNTEITKAPLSASMIKRYDEHHQDLTLLKALVRQQLPEKYKEIFFDQSKNGYAGYIDGGASQEEFYKFIKPILEKMDGTEELLVKLNREDLLRKQRTFDNGSIPHQIHLGELHAILRRQEDFYPFLKDNREKIEKILTFRIPYYVGPLARGNSRFAWMTRKSEETITPWNFEEVVDKGASAQSFIERMTNFDKNLPNEKVLPKHSLLYEYFTVYNELTKVKYVTEGMRKPAFLSGEQKKAIVDLLFKTNRKVTVKQLKEDYFKKIECFDSVEISGVEDRFNASLGTYHDLLKIIKDKDFLDNEENEDILEDIVLTLTLFEDREMIEERLKTYAHLFDDKVMKQLKRRRYTGWGRLSRKLINGIRDKQSGKTILDFLKSDGFANRNFMQLIHDDSLTFKEDIQKAQVSGQGDSLHEHIANLAGSPAIKKGILQTVKVVDELVKVMGRHKPENIVIEMARENQTTQKGQKNSRERMKRIEEGIKELGSQILKEHPVENTQLQNEKLYLYYLQNGRDMYVDQELDINRLSDYDVDHIVPQSFLKDDSIDNKVLTRSDKNRGKSDNVPSEEVVKKMKNYWRQLLNAKLITQRKFDNLTKAERGGLSELDKAGFIKRQLVETRQITKHVAQILDSRMNTKYDENDKLIREVKVITLKSKLVSDFRKDFQFYKVREINNYHHAHDAYLNAVVGTALIKKYPKLESEFVYGDYKVYDVRKMIAKSEQEIGKATAKYFFYSNIMNFFKTEITLANGEIRKRPLIETNGETGEIVWDKGRDFATVRKVLSMPQVNIVKKTEVQTGGFSKESILPKRNSDKLIARKKDWDPKKYGGFDSPTVAYSVLVVAKVEKGKSKKLKSVKELLGITIMERSSFEKNPIDFLEAKGYKEVKKDLIIKLPKYSLFELENGRKRMLASAGELQKGNELALPSKYVNFLYLASHYEKLKGSPEDNEQKQLFVEQHKHYLDEIIEQISEFSKRVILADANLDKVLSAYNKHRDKPIREQAENIIHLFTLTNLGAPAAFKYFDTTIDRKRYTSTKEVLDATLIHQSITGLYETRIDLSQLGGDPPKKKRKV

SEQ ID NO: 260 - protein, 1372 aa, Artificial Sequence
  Synthetic polypeptide
GAASMDKKYSIGLAIGTNSVGWAVITDEYKVPSKKFKVLGNTDRHSIKKNLIGALLFDSGETAEATRLKRTARRRYTRRKNRICYLQEIFSNEMAKVDDSFFHRLEESFLVEEDKKHERHPIFGNIVDEVAYHEKYPTIYHLRKKLVDSTDKADLRLIYLALAHMIKFRGHFLIEGDLNPDNSDVDKLFIQLVQTYNQLFEENPINASGVDAKAILSARLSKSRRLENLIAQLPGEKKNGLFGNLIALSLGLTPNFKSNFDLAEDAKLQLSKDTYDDDLDNLLAQIGDQYADLFLAAKNLSDAILLSDILRVNTEITKAPLSASMIKRYDEHHQDLTLLKALVRQQLPEKYKEIFFDQSKNGYAGYIDGGASQEEFYKFIKPILEKMDGTEELLVKLNREDLLRKQRTFDNGSIPHQIHLGELHAILRRQEDFYPFLKDNREKIEKILTFRIPYYVGPLARGNSRFAWMTRKSEETITPWNFEEVVDKGASAQSFIERMTNFDKNLPNEKVLPKHSLLYEYFTVYNELTKVKYVTEGMRKPAFLSGEQKKAIVDLLFKTNRKVTVKQLKEDYFKKIECFDSVEISGVEDRFNASLGTYHDLLKIIKDKDFLDNEENEDILEDIVLTLTLFEDREMIEERLKTYAHLFDDKVMKQLKRRRYTGWGRLSRKLINGIRDKQSGKTILDFLKSDGFANRNFMQLIHDDSLTFKEDIQKAQVSGQGDSLHEHIANLAGSPAIKKGILQTVKVVDELVKVMGRHKPENIVIEMARENQTTQKGQKNSRERMKRIEEGIKELGSQILKEHPVENTQLQNEKLYLYYLQNGRDMYVDQELDINRLSDYDVDAIVPQSFLKDDSIDNKVLTRSDKNRGKSDNVPSEEVVKKMKNYWRQLLNAKLITQRKFDNLTKAERGGLSELDKAGFIKRQLVETRQITKHVAQILDSRMNTKYDENDKLIREVKVITLKSKLVSDFRKDFQFYKVREINNYHHAHDAYLNAVVGTALIKKYPKLESEFVYGDYKVYDVRKMIAKSEQEIGKATAKYFFYSNIMNFFKTEITLANGEIRKRPLIETNGETGEIVWDKGRDFATVRKVLSMPQVNIVKKTEVQTGGFSKESILPKRNSDKLIARKKDWDPKKYGGFDSPTVAYSVLVVAKVEKGKSKKLKSVKELLGITIMERSSFEKNPIDFLEAKGYKEVKKDLIIKLPKYSLFELENGRKRMLASAGELQKGNELALPSKYVNFLYLASHYEKLKGSPEDNEQKQLFVEQHKHYLDEIIEQISEFSKRVILADANLDKVLSAYNKHRDKPIREQAENIIHLFTLTNLGAPAAFKYFDTTIDRKRYTSTKEVLDATLIHQSITGLYETRIDLSQLGGD

SEQ ID NO: 261 - protein, 1300 aa, Artificial Sequence
  Synthetic polypeptide
MSIYQEFVNKYSLSKTLRFELIPQGKTLENIKARGLILDDEKRAKDYKKAKQIIDKYHQFFIEEILSSVCISEDLLQNYSDVYFKLKKSDDDNLQKDFKSAKDTIKKQISEYIKDSEKFKNLFNQNLIDAKKGQESDLILWLKQSKDNGIELFKANSDITDIDEALEIIKSFKGWTTYFKGFHENRKNVYSSNDIPTSIIYRIVDDNLPKFLENKAKYESLKDKAPEAINYEQIKKDLAEELTFDIDYKTSEVNQRVFSLDEVFEIANFNNYLNQSGITKFNTIIGGKFVNGENTKRKGINEYINLYSQQINDKTLKKYKMSVLFKQILSDTESKSFVIDKLEDDSDVVTTMQSFYEQIAAFKTVEEKSIKETLSLLFDDLKAQKLDLSKIYFKNDKSLTDLSQQVFDDYSVIGTAVLEYITQQIAPKNLDNPSKKEQELIAKKTEKAKYLSLETIKLALEEFNKHRDIDKQCRFEEILANFAAIPMIFDEIAQNKDNLAQISIKYQNQGKKDLLQASAEDDVKAIKDLLDQTNNLLHKLKIFHISQSEDKANILDKDEHFYLVFEECYFELANIVPLYNKIRNYITQKPYSDEKFKLNFENSTLANGWDKNKEPDNTAILFIKDDKYYLGVMNKKNNKIFDDKAIKENKGEGYKKIVYKLLPGANKMLPKVFFSAKSIKFYNPSEDILRIRNHSTHTKNGSPQKGYEKFEFNIEDCRKFIDFYKQSISKHPEWKDFGFRFSDTQRYNSIDEFYREVENQGYKLTFENISESYIDSVVNQGKLYLFQIYNKDFSAYSKGRPNLHTLYWKALFDERNLQDVVYKLNGEAELFYRKQSIPKKITHPAKEAIANKNKDNPKKESVFEYDLIKDKRFTEDKFFFHCPITINFKSSGANKFNDEINLLLKEKANDVHILSIARGERHLAYYTLVDGKGNIIKQDTFNIIGNDRMKTNYHDKLAAIEKDRDSARKDWKKINNIKEMKEGYLSQVVHEIAKLVIEYNAIVVFEDLNFGFKRGRFKVEKQVYQKLEKMLIEKLNYLVFKDNEFDKTGGVLRAYQLTAPFETFKKMGKQTGIIYYVPAGFTSKICPVTGFVNQLYPKYESVSKSQEFFSKFDKICYNLDKGYFEFSFDYKNFGDKAAKGKWTIASFGSRLINFRNSDKNHNWDTREVYPTKELEKLLKDYSIEYGHGECIKAAICGESDKKFFAKLTSVLNTILQMRNSKTGTELDYLISPVADVNGNFFDSRQAPKNMPQDADANGAYHIGLKGLMLLGRIKNNQEGKKLNLVIKNEEYFEFVQNRNN

SEQ ID NO: 262 - protein, 1300 aa, Artificial Sequence
  Synthetic polypeptide
MSIYQEFVNKYSLSKTLRFELIPQGKTLENIKARGLILDDEKRAKDYKKAKQIIDKYHQFFIEEILSSVCISEDLLQNYSDVYFKLKKSDDDNLQKDFKSAKDTIKKQISEYIKDSEKFKNLFNQNLIDAKKGQESDLILWLKQSKDNGIELFKANSDITDIDEALEIIKSFKGWTTYFKGFHENRKNVYSSNDIPTSIIYRIVDDNLPKFLENKAKYESLKDKAPEAINYEQIKKDLAEELTFDIDYKTSEVNQRVFSLDEVFEIANFNNYLNQSGITKFNTIIGGKFVNGENTKRKGINEYINLYSQQINDKTLKKYKMSVLFKQILSDTESKSFVIDKLEDDSDVVTTMQSFYEQIAAFKTVEEKSIKETLSLLFDDLKAQKLDLSKIYFKNDKSLTDLSQQVFDDYSVIGTAVLEYITQQIAPKNLDNPSKKEQELIAKKTEKAKYLSLETIKLALEEFNKHRDIDKQCRFEEILANFAAIPMIFDEIAQNKDNLAQISIKYQNQGKKDLLQASAEDDVKAIKDLLDQTNNLLHKLKIFHISQSEDKANILDKDEHFYLVFEECYFELANIVPLYNKIRNYITQKPYSDEKFKLNFENSTLANGWDKNKEPDNTAILFIKDDKYYLGVMNKKNNKIFDDKAIKENKGEGYKKIVYKLLPGANKMLPKVFFSAKSIKFYNPSEDILRIRNHSTHTKNGSPQKGYEKFEFNIEDCRKFIDFYKQSISKHPEWKDFGFRFSDTQRYNSIDEFYREVENQGYKLTFENISESYIDSVVNQGKLYLFQIYNKDFSAYSKGRPNLHTLYWKALFDERNLQDVVYKLNGEAELFYRKQSIPKKITHPAKEAIANKNKDNPKKESVFEYDLIKDKRFTEDKFFFHCPITINFKSSGANKFNDEINLLLKEKANDVHILSIDRGERHLAYYTLVDGKGNIIKQDTFNIIGNDRMKTNYHDKLAAIEKDRDSARKDWKKINNIKEMKEGYLSQVVHEIAKLVIEYNAIVVFADLNFGFKRGRFKVEKQVYQKLEKMLIEKLNYLVFKDNEFDKTGGVLRAYQLTAPFETFKKMGKQTGIIYYVPAGFTSKICPVTGFVNQLYPKYESVSKSQEFFSKFDKICYNLDKGYFEFSFDYKNFGDKAAKGKWTIASFGSRLINFRNSDKNHNWDTREVYPTKELEKLLKDYSIEYGHGECIKAAICGESDKKFFAKLTSVLNTILQMRNSKTGTELDYLISPVADVNGNFFDSRQAPKNMPQDADANGAYHIGLKGLMLLGRIKNNQEGKKLNLVIKNEEYFEFVQNRNN

SEQ ID NO: 263 - protein, 1300 aa, Artificial Sequence
  Synthetic polypeptide
MSIYQEFVNKYSLSKTLRFELIPQGKTLENIKARGLILDDEKRAKDYKKAKQIIDKYHQFFIEEILSSVCISEDLLQNYSDVYFKLKKSDDDNLQKDFKSAKDTIKKQISEYIKDSEKFKNLFNQNLIDAKKGQESDLILWLKQSKDNGIELFKANSDITDIDEALEIIKSFKGWTTYFKGFHENRKNVYSSNDIPTSIIYRIVDDNLPKFLENKAKYESLKDKAPEAINYEQIKKDLAEELTFDIDYKTSEVNQRVFSLDEVFEIANFNNYLNQSGITKFNTIIGGKFVNGENTKRKGINEYINLYSQQINDKTLKKYKMSVLFKQILSDTESKSFVIDKLEDDSDVVTTMQSFYEQIAAFKTVEEKSIKETLSLLFDDLKAQKLDLSKIYFKNDKSLTDLSQQVFDDYSVIGTAVLEYITQQIAPKNLDNPSKKEQELIAKKTEKAKYLSLETIKLALEEFNKHRDIDKQCRFEEILANFAAIPMIFDEIAQNKDNLAQISIKYQNQGKKDLLQASAEDDVKAIKDLLDQTNNLLHKLKIFHISQSEDKANILDKDEHFYLVFEECYFELANIVPLYNKIRNYITQKPYSDEKFKLNFENSTLANGWDKNKEPDNTAILFIKDDKYYLGVMNKKNNKIFDDKAIKENKGEGYKKIVYKLLPGANKMLPKVFFSAKSIKFYNPSEDILRIRNHSTHTKNGSPQKGYEKFEFNIEDCRKFIDFYKQSISKHPEWKDFGFRFSDTQRYNSIDEFYREVENQGYKLTFENISESYIDSVVNQGKLYLFQIYNKDFSAYSKGRPNLHTLYWKALFDERNLQDVVYKLNGEAELFYRKQSIPKKITHPAKEAIANKNKDNPKKESVFEYDLIKDKRFTEDKFFFHCPITINFKSSGANKFNDEINLLLKEKANDVHILSIDRGERHLAYYTLVDGKGNIIKQDTFNIIGNDRMKTNYHDKLAAIEKDRDSARKDWKKINNIKEMKEGYLSQVVHEIAKLVIEYNAIVVFEDLNFGFKRGRFKVEKQVYQKLEKMLIEKLNYLVFKDNEFDKTGGVLRAYQLTAPFETFKKMGKQTGIIYYVPAGFTSKICPVTGFVNQLYPKYESVSKSQEFFSKFDKICYNLDKGYFEFSFDYKNFGDKAAKGKWTIASFGSRLINFRNSDKNHNWDTREVYPTKELEKLLKDYSIEYGHGECIKAAICGESDKKFFAKLTSVLNTILQMRNSKTGTELDYLISPVADVNGNFFDSRQAPKNMPQDAAANGAYHIGLKGLMLLGRIKNNQEGKKLNLVIKNEEYFEFVQNRNN

SEQ ID NO: 264 - protein, 1300 aa, Artificial Sequence
  Synthetic polypeptide
MSIYQEFVNKYSLSKTLRFELIPQGKTLENIKARGLILDDEKRAKDYKKAKQIIDKYHQFFIEEILSSVCISEDLLQNYSDVYFKLKKSDDDNLQKDFKSAKDTIKKQISEYIKDSEKFKNLFNQNLIDAKKGQESDLILWLKQSKDNGIELFKANSDITDIDEALEIIKSFKGWTTYFKGFHENRKNVYSSNDIPTSIIYRIVDDNLPKFLENKAKYESLKDKAPEAINYEQIKKDLAEELTFDIDYKTSEVNQRVFSLDEVFEIANFNNYLNQSGITKFNTIIGGKFVNGENTKRKGINEYINLYSQQINDKTLKKYKMSVLFKQILSDTESKSFVIDKLEDDSDVVTTMQSFYEQIAAFKTVEEKSIKETLSLLFDDLKAQKLDLSKIYFKNDKSLTDLSQQVFDDYSVIGTAVLEYITQQIAPKNLDNPSKKEQELIAKKTEKAKYLSLETIKLALEEFNKHRDIDKQCRFEEILANFAAIPMIFDEIAQNKDNLAQISIKYQNQGKKDLLQASAEDDVKAIKDLLDQTNNLLHKLKIFHISQSEDKANILDKDEHFYLVFEECYFELANIVPLYNKIRNYITQKPYSDEKFKLNFENSTLANGWDKNKEPDNTAILFIKDDKYYLGVMNKKNNKIFDDKAIKENKGEGYKKIVYKLLPGANKMLPKVFFSAKSIKFYNPSEDILRIRNHSTHTKNGSPQKGYEKFEFNIEDCRKFIDFYKQSISKHPEWKDFGFRFSDTQRYNSIDEFYREVENQGYKLTFENISESYIDSVVNQGKLYLFQIYNKDFSAYSKGRPNLHTLYWKALFDERNLQDVVYKLNGEAELFYRKQSIPKKITHPAKEAIANKNKDNPKKESVFEYDLIKDKRFTEDKFFFHCPITINFKSSGANKFNDEINLLLKEKANDVHILSIARGERHLAYYTLVDGKGNIIKQDTFNIIGNDRMKTNYHDKLAAIEKDRDSARKDWKKINNIKEMKEGYLSQVVHEIAKLVIEYNAIVVFADLNFGFKRGRFKVEKQVYQKLEKMLIEKLNYLVFKDNEFDKTGGVLRAYQLTAPFETFKKMGKQTGIIYYVPAGFTSKICPVTGFVNQLYPKYESVSKSQEFFSKFDKICYNLDKGYFEFSFDYKNFGDKAAKGKWTIASFGSRLINFRNSDKNHNWDTREVYPTKELEKLLKDYSIEYGHGECIKAAICGESDKKFFAKLTSVLNTILQMRNSKTGTELDYLISPVADVNGNFFDSRQAPKNMPQDADANGAYHIGLKGLMLLGRIKNNQEGKKLNLVIKNEEYFEFVQNRNN

SEQ ID NO: 265 - protein, 1300 aa, Artificial Sequence
  Synthetic polypeptide
MSIYQEFVNKYSLSKTLRFELIPQGKTLENIKARGLILDDEKRAKDYKKAKQIIDKYHQFFIEEILSSVCISEDLLQNYSDVYFKLKKSDDDNLQKDFKSAKDTIKKQISEYIKDSEKFKNLFNQNLIDAKKGQESDLILWLKQSKDNGIELFKANSDITDIDEALEIIKSFKGWTTYFKGFHENRKNVYSSNDIPTSIIYRIVDDNLPKFLENKAKYESLKDKAPEAINYEQIKKDLAEELTFDIDYKTSEVNQRVFSLDEVFEIANFNNYLNQSGITKFNTIIGGKFVNGENTKRKGINEYINLYSQQINDKTLKKYKMSVLFKQILSDTESKSFVIDKLEDDSDVVTTMQSFYEQIAAFKTVEEKSIKETLSLLFDDLKAQKLDLSKIYFKNDKSLTDLSQQVFDDYSVIGTAVLEYITQQIAPKNLDNPSKKEQELIAKKTEKAKYLSLETIKLALEEFNKHRDIDKQCRFEEILANFAAIPMIFDEIAQNKDNLAQISIKYQNQGKKDLLQASAEDDVKAIKDLLDQTNNLLHKLKIFHISQSEDKANILDKDEHFYLVFEECYFELANIVPLYNKIRNYITQKPYSDEKFKLNFENSTLANGWDKNKEPDNTAILFIKDDKYYLGVMNKKNNKIFDDKAIKENKGEGYKKIVYKLLPGANKMLPKVFFSAKSIKFYNPSEDILRIRNHSTHTKNGSPQKGYEKFEFNIEDCRKFIDFYKQSISKHPEWKDFGFRFSDTQRYNSIDEFYREVENQGYKLTFENISESYIDSVVNQGKLYLFQIYNKDFSAYSKGRPNLHTLYWKALFDERNLQDVVYKLNGEAELFYRKQSIPKKITHPAKEAIANKNKDNPKKESVFEYDLIKDKRFTEDKFFFHCPITINFKSSGANKFNDEINLLLKEKANDVHILSIARGERHLAYYTLVDGKGNIIKQDTFNIIGNDRMKTNYHDKLAAIEKDRDSARKDWKKINNIKEMKEGYLSQVVHEIAKLVIEYNAIVVFEDLNFGFKRGRFKVEKQVYQKLEKMLIEKLNYLVFKDNEFDKTGGVLRAYQLTAPFETFKKMGKQTGIIYYVPAGFTSKICPVTGFVNQLYPKYESVSKSQEFFSKFDKICYNLDKGYFEFSFDYKNFGDKAAKGKWTIASFGSRLINFRNSDKNHNWDTREVYPTKELEKLLKDYSIEYGHGECIKAAICGESDKKFFAKLTSVLNTILQMRNSKTGTELDYLISPVADVNGNFFDSRQAPKNMPQDAAANGAYHIGLKGLMLLGRIKNNQEGKKLNLVIKNEEYFEFVQNRNN

SEQ ID NO: 266 - protein, 1300 aa, Artificial Sequence
  Synthetic polypeptide
MSIYQEFVNKYSLSKTLRFELIPQGKTLENIKARGLILDDEKRAKDYKKAKQIIDKYHQFFIEEILSSVCISEDLLQNYSDVYFKLKKSDDDNLQKDFKSAKDTIKKQISEYIKDSEKFKNLFNQNLIDAKKGQESDLILWLKQSKDNGIELFKANSDITDIDEALEIIKSFKGWTTYFKGFHENRKNVYSSNDIPTSIIYRIVDDNLPKFLENKAKYESLKDKAPEAINYEQIKKDLAEELTFDIDYKTSEVNQRVFSLDEVFEIANFNNYLNQSGITKFNTIIGGKFVNGENTKRKGINEYINLYSQQINDKTLKKYKMSVLFKQILSDTESKSFVIDKLEDDSDVVTTMQSFYEQIAAFKTVEEKSIKETLSLLFDDLKAQKLDLSKIYFKNDKSLTDLSQQVFDDYSVIGTAVLEYITQQIAPKNLDNPSKKEQELIAKKTEKAKYLSLETIKLALEEFNKHRDIDKQCRFEEILANFAAIPMIFDEIAQNKDNLAQISIKYQNQGKKDLLQASAEDDVKAIKDLLDQTNNLLHKLKIFHISQSEDKANILDKDEHFYLVFEECYFELANIVPLYNKIRNYITQKPYSDEKFKLNFENSTLANGWDKNKEPDNTAILFIKDDKYYLGVMNKKNNKIFDDKAIKENKGEGYKKIVYKLLPGANKMLPKVFFSAKSIKFYNPSEDILRIRNHSTHTKNGSPQKGYEKFEFNIEDCRKFIDFYKQSISKHPEWKDFGFRFSDTQRYNSIDEFYREVENQGYKLTFENISESYIDSVVNQGKLYLFQIYNKDFSAYSKGRPNLHTLYWKALFDERNLQDVVYKLNGEAELFYRKQSIPKKITHPAKEAIANKNKDNPKKESVFEYDLIKDKRFTEDKFFFHCPITINFKSSGANKFNDEINLLLKEKANDVHILSIDRGERHLAYYTLVDGKGNIIKQDTFNIIGNDRMKTNYHDKLAAIEKDRDSARKDWKKINNIKEMKEGYLSQVVHEIAKLVIEYNAIVVFADLNFGFKRGRFKVEKQVYQKLEKMLIEKLNYLVFKDNEFDKTGGVLRAYQLTAPFETFKKMGKQTGIIYYVPAGFTSKICPVTGFVNQLYPKYESVSKSQEFFSKFDKICYNLDKGYFEFSFDYKNFGDKAAKGKWTIASFGSRLINFRNSDKNHNWDTREVYPTKELEKLLKDYSIEYGHGECIKAAICGESDKKFFAKLTSVLNTILQMRNSKTGTELDYLISPVADVNGNFFDSRQAPKNMPQDAAANGAYHIGLKGLMLLGRIKNNQEGKKLNLVIKNEEYFEFVQNRNN

SEQ ID NO: 267 - protein, 1300 aa, Artificial Sequence
  Synthetic polypeptide
MSIYQEFVNKYSLSKTLRFELIPQGKTLENIKARGLILDDEKRAKDYKKAKQIIDKYHQFFIEEILSSVCISEDLLQNYSDVYFKLKKSDDDNLQKDFKSAKDTIKKQISEYIKDSEKFKNLFNQNLIDAKKGQESDLILWLKQSKDNGIELFKANSDITDIDEALEIIKSFKGWTTYFKGFHENRKNVYSSNDIPTSIIYRIVDDNLPKFLENKAKYESLKDKAPEAINYEQIKKDLAEELTFDIDYKTSEVNQRVFSLDEVFEIANFNNYLNQSGITKFNTIIGGKFVNGENTKRKGINEYINLYSQQINDKTLKKYKMSVLFKQILSDTESKSFVIDKLEDDSDVVTTMQSFYEQIAAFKTVEEKSIKETLSLLFDDLKAQKLDLSKIYFKNDKSLTDLSQQVFDDYSVIGTAVLEYITQQIAPKNLDNPSKKEQELIAKKTEKAKYLSLETIKLALEEFNKHRDIDKQCRFEEILANFAAIPMIFDEIAQNKDNLAQISIKYQNQGKKDLLQASAEDDVKAIKDLLDQTNNLLHKLKIFHISQSEDKANILDKDEHFYLVFEECYFELANIVPLYNKIRNYITQKPYSDEKFKLNFENSTLANGWDKNKEPDNTAILFIKDDKYYLGVMNKKNNKIFDDKAIKENKGEGYKKIVYKLLPGANKMLPKVFFSAKSIKFYNPSEDILRIRNHSTHTKNGSPQKGYEKFEFNIEDCRKFIDFYKQSISKHPEWKDFGFRFSDTQRYNSIDEFYREVENQGYKLTFENISESYIDSVVNQGKLYLFQIYNKDFSAYSKGRPNLHTLYWKALFDERNLQDVVYKLNGEAELFYRKQSIPKKITHPAKEAIANKNKDNPKKESVFEYDLIKDKRFTEDKFFFHCPITINFKSSGANKFNDEINLLLKEKANDVHILSIARGERHLAYYTLVDGKGNIIKQDTFNIIGNDRMKTNYHDKLAAIEKDRDSARKDWKKINNIKEMKEGYLSQVVHEIAKLVIEYNAIVVFADLNFGFKRGRFKVEKQVYQKLEKMLIEKLNYLVFKDNEFDKTGGVLRAYQLTAPFETFKKMGKQTGIIYYVPAGFTSKICPVTGFVNQLYPKYESVSKSQEFFSKFDKICYNLDKGYFEFSFDYKNFGDKAAKGKWTIASFGSRLINFRNSDKNHNWDTREVYPTKELEKLLKDYSIEYGHGECIKAAICGESDKKFFAKLTSVLNTILQMRNSKTGTELDYLISPVADVNGNFFDSRQAPKNMPQDAAANGAYHIGLKGLMLLGRIKNNQEGKKLNLVIKNEEYFEFVQNRNN

SEQ ID NO: 268 - protein, 1053 aa, Artificial Sequence
  Synthetic polypeptide
MKRNYILGLAIGITSVGYGIIDYETRDVIDAGVRLFKEANVENNEGRRSKRGARRLKRRRRHRIQRVKKLLFDYNLLTDHSELSGINPYEARVKGLSQKLSEEEFSAALLHLAKRRGVHNVNEVEEDTGNELSTKEQISRNSKALEEKYVAELQLERLKKDGEVRGSINRFKTSDYVKEAKQLLKVQKAYHQLDQSFIDTYIDLLETRRTYYEGPGEGSPFGWKDIKEWYEMLMGHCTYFPEELRSVKYAYNADLYNALNDLNNLVITRDENEKLEYYEKFQIIENVFKQKKKPTLKQIAKEILVNEEDIKGYRVTSTGKPEFTNLKVYHDIKDITARKEIIENAELLDQIAKILTIYQSSEDIQEELTNLNSELTQEEIEQISNLKGYTGTHNLSLKAINLILDELWHTNDNQIAIFNRLKLVPKKVDLSQQKEIPTTLVDDFILSPVVKRSFIQSIKVINAIIKKYGLPNDIIIELAREKNSKDAQKMINEMQKRNRQTNERIEEIIRTTGKENAKYLIEKIKLHDMQEGKCLYSLEAIPLEDLLNNPFNYEVDHIIPRSVSFDNSFNNKVLVKQEENSKKGNRTPFQYLSSSDSKISYETFKKHILNLAKGKGRISKTKKEYLLEERDINRFSVQKDFINRNLVDTRYATRGLMNLLRSYFRVNNLDVKVKSINGGFTSFLRRKWKFKKERNKGYKHHAEDALIIANADFIFKEWKKLDKAKKVMENQMFEEKQAESMPEIETEQEYKEIFITPHQIKHIKDFKDYKYSHRVDKKPNRKLINDTLYSTRKDDKGNTLIVNNLNGLYDKDNDKLKKLINKSPEKLLMYHHDPQTYQKLKLIMEQYGDEKNPLYKYYEETGNYLTKYSKKDNGPVIKKIKYYGNKLNAHLDITDDYPNSRNKVVKLSLKPYRFDVYLDNGVYKFVTVKNLDVIKKENYYEVNSKCYEEAKKLKKISNQAEFIASFYKNDLIKINGELYRVIGVNNDLLNRIEVNMIDITYREYLENMNDKRPPHIIKTIASKTQSIKKYSTDILGNLYEVKSKKHPQIIKKG

SEQ ID NO: 269 - protein, 1121 aa, Artificial Sequence
  Synthetic polypeptide
MSDLVLGLAIGIGSVGVGILNKVTGEIIHKNSRIFPAAQAENNLVRRTNRQGRRLTRRKKHRRVRLNRLFEESGLITDFTKISINLNPYQLRVKGLTDELSNEELFIALKNMVKHRGISYLDDASDDGNSSIGDYAQIVKENSKQLETKTPGQIQLERYQTYGQLRGDFTVEKDGKKHRLINVFPTSAYRSEALRILQTQQEFNPQITDEFINRYLEILTGKRKYYHGPGNEKSRTDYGRYRTSGETLDNIFGILIGKCTFYPDEFRAAKASYTAQEFNLLNDLNNLTVPTETKKLSKEQKNQIINYVKNEKAMGPAKLFKYIAKLLSCDVADIKGYRIDKSGKAEIHTFEAYRKMKTLETLDIEQMDRETLDKLAYVLTLNTEREGIQEALEHEFADGSFSQKQVDELVQFRKANSSIFGKGWHNFSVKLMMELIPELYETSEEQMTILTRLGKQKTTSSSNKTKYIDEKLLTEEIYNPVVAKSVRQAIKIVNAAIKEYGDFDNIVIEMARETNEDDEKKAIQKIQKANKDEKDAAMLKAANQYNGKAELPHSVFHGHKQLATKIRLWHQQGERCLYTGKTISIHDLINNSNQFEVDHILPLSITFDDSLANKVLVYATANQEKGQRTPYQALDSMDDAWSFRELKAFVRESKTLSNKKKEYLLTEEDISKFDVRKKFIERNLVDTRYASRVVLNALQEHFRAHKIDTKVSVVRGQFTSQLRRHWGIEKTRDTYHHHAVDALIIAASSQLNLWKKQKNTLVSYSEDQLLDIETGELISDDEYKESVFKAPYQHFVDTLKSKEFEDSILFSYQVDSKFNRKISDATIYATRQAKVGKDKADETYVLGKIKDIYTQDGYDAFMKIYKKDKSKFLMYRHDPQTFEKVIEPILENYPNKQINEKGKEVPCNPFLKYKEEHGYIRKYSKKGNGPEIKSLKYYDSKLGNHIDITPKDSNNKVVLQSVSPWRADVYFNKTTGKYEILGLKYADLQFEKGTGTYKISQEKYNDIKKKEGVDSDSEFKFTLYKNDLLLVKDTETKEQQLFRFLSRTMPKQKHYVELKPYDKQKFEGGEALIKVLGNVANSGQCKKGLGKSNISIYKVRTDVLGNQHIIKNEGDKPKLDF

SEQ ID NO: 270 - protein, 887 aa, Natronobacterium gregoryi
MTVIDLDSTTTADELTSGHTYDISVTLTGVYDNTDEQHPRMSLAFEQDNGERRYITLWKNTTPKDVFTYDYATGSTYIFTNIDYEVKDGYENLTATYQTTVENATAQEVGTTDEDETFAGGEPLDHHLDDALNETPDDAETESDSGHVMTSFASRDQLPEWTLHTYTLTATDGAKTDTEYARRTLAYTVRQELYTDHDAAPVATDGLMLLTPEPLGETPLDLDCGVRVEADETRTLDYTTAKDRLLARELVEEGLKRSLWDDYLVRGIDEVLSKEPVLTCDEFDLHERYDLSVEVGHSGRAYLHINFRHRFVPKLTLADIDDDNIYPGLRVKTTYRPRRGHIVWGLRDECATDSLNTLGNQSVVAYHRNNQTPINTDLLDAIEAADRRVVETRRQGHGDDAVSFPQELLAVEPNTHQIKQFASDGFHQQARSKTRLSASRCSEKAQAFAERLDPVRLNGSTVEFSSEFFTGNNEQQLRLLYENGESVLTFRDGARGAHPDETFSKGIVNPPESFEVAVVLPEQQADTCKAQWDTMADLLNQAGAPPTRSETVQYDAFSSPESISLNVAGAIDPSEVDAAFVVLPPDQEGFADLASPTETYDELKKALANMGIYSQMAYFDRFRDAKIFYTRNVALGLLAAAGGVAFTTEHAMPGDADMFIGIDVSRSYPEDGASGQINIAATATAVYKDGTILGHSSTRPQLGEKLQSTDVRDIMKNAILGYQQVTGESPTHIVIHRDGFMNEDLDPATEFLNEQGVEYDIVEIRKQPQTRLLAVSDVQYDTPVKSIAAINQNEPRATVATFGAPEYLATRDGGGLPRPIQIERVAGETDIETLTRQVYLLSQSHIQVHNSTARLPITTAYADQASTHATKGYLVQTGAFESNVGFL

SEQ ID NO: 271 - protein, 198 aa, Mus musculus
MDSLLMKQKKFLYHFKNVRWAKGRHETYLCYVVKRRDSATSCSLDFGHLRNKSGCHVELLFLRYISDWDLDPGRCYRVTWFTSWSPCYDCARHVAEFLRWNPNLSLRIFTARLYFCEDRKAEPEGLRRLHRAGVQIGIMTFKDYFYCWNTFVENRERTFKAWEGLHENSVRLTRQLRRILLPLYEVDDLRDAFRMLGF

SEQ ID NO: 272 - protein, 198 aa, Canis lupus familiaris
MDSLLMKQRKFLYHFKNVRWAKGRHETYLCYVVKRRDSATSFSLDFGHLRNKSGCHVELLFLRYISDWDLDPGRCYRVTWFTSWSPCYDCARHVADFLRGYPNLSLRIFAARLYFCEDRKAEPEGLRRLHRAGVQIAIMTFKDYFYCWNTFVENREKTFKAWEGLHENSVRLSRQLRRILLPLYEVDDLRDAFRTLGL

SEQ ID NO: 273 - protein, 199 aa, Bos taurus
MDSLLKKQRQFLYQFKNVRWAKGRHETYLCYVVKRRDSPTSFSLDFGHLRNKAGCHVELLFLRYISDWDLDPGRCYRVTWFTSWSPCYDCARHVADFLRGYPNLSLRIFTARLYFCDKERKAEPEGLRRLHRAGVQIAIMTFKDYFYCWNTFVENHERTFKAWEGLHENSVRLSRQLRRILLPLYEVDDLRDAFRTLGL

SEQ ID NO: 274 - protein, 429 aa, Mus musculus
MGPFCLGCSHRKCYSPIRNLISQETFKFHFKNLGYAKGRKDTFLCYEVTRKDCDSPVSLHHGVFKNKDNIHAEICFLYWFHDKVLKVLSPREEFKITWYMSWSPCFECAEQIVRFLATHHNLSLDIFSSRLYNVQDPETQQNLCRLVQEGAQVAAMDLYEFKKCWKKFVDNGGRRFRPWKRLLTNFRYQDSKLQEILRPCYIPVPSSSSSTLSNICLTKGLPETRFCVEGRRMDPLSEEEFYSQFYNQRVKHLCYYHRMKPYLCYQLEQFNGQAPLKGCLLSEKGKQHAEILFLDKIRSMELSQVTITCYLTWSPCPNCAWQLAAFKRDRPDLILHIYTSRLYFHWKRPFQKGLCSLWQSGILVDVMDLPQFTDCWTNFVNPKRPFWPWKGLEIISRRTQRRLRRIKESWGLQDLVNDFGNLQLGPPMS

SEQ ID NO: 275 - protein, 429 aa, Rattus norvegicus
MGPFCLGCSHRKCYSPIRNLISQETFKFHFKNLRYAIDRKDTFLCYEVTRKDCDSPVSLHHGVFKNKDNIHAEICFLYWFHDKVLKVLSPREEFKITWYMSWSPCFECAEQVLRFLATHHNLSLDIFSSRLYNIRDPENQQNLCRLVQEGAQVAAMDLYEFKKCWKKFVDNGGRRFRPWKKLLTNFRYQDSKLQEILRPCYIPVPSSSSSTLSNICLTKGLPETRFCVERRRVHLLSEEEFYSQFYNQRVKHLCYYHGVKPYLCYQLEQFNGQAPLKGCLLSEKGKQHAEILFLDKIRSMELSQVIITCYLTWSPCPNCAWQLAAFKRDRPDLILHIYTSRLYFHWKRPFQKGLCSLWQSGILVDVMDLPQFTDCWTNFVNPKRPFWPWKGLEIISRRTQRRLHRIKESWGLQDLVNDFGNLQLGPPMS

SEQ ID NO: 276 - protein, 370 aa, Macaca mulatta
MVEPMDPRTFVSNFNNRPILSGLNTVWLCCEVKTKDPSGPPLDAKIFQGKVYSKAKYHPEMRFLRWFHKWRQLHHDQEYKVTWYVSWSPCTRCANSVATFLAKDPKVTLTIFVARLYYFWKPDYQQALRILCQKRGGPHATMKIMNYNEFQDCWNKFVDGRGKPFKPRNNLPKHYTLLQATLGELLRHLMDPGTFTSNFNNKPWVSGQHETYLCYKVERLHNDTWVPLNQHRGFLRNQAPNIHGFPKGRHAELCFLDLIPFWKLDGQQYRVTCFTSWSPCFSCAQEMAKFISNNEHVSLCIFAARIYDDQGRYQEGLRALHRDGAKIAMMNYSEFEYCWDTFVDRQGRPFQPWDGLDEHSQALSGRLRAI

SEQ ID NO: 277 - protein, 384 aa, Pan troglodytes
MKPHFRNPVERMYQDTFSDNFYNRPILSHRNTVWLCYEVKTKGPSRPPLDAKIFRGQVYSKLKYHPEMRFFHWFSKWRKLHRDQEYEVTWYISWSPCTKCTRDVATFLAEDPKVTLTIFVARLYYFWDPDYQEALRSLCQKRDGPRATMKIMNYDEFQHCWSKFVYSQRELFEPWNNLPKYYILLHIMLGEILRHSMDPPTFTSNFNNELWVRGRHETYLCYEVERLHNDTWVLLNQRRGFLCNQAPHKHGFLEGRHAELCFLDVIPFWKLDLHQDYRVTCFTSWSPCFSCAQEMAKFISNNKHVSLCIFAARIYDDQGRCQEGLRTLAKAGAKISIMTYSEFKHCWDTFVDHQGCPFQPWDGLEEHSQALSGRLRAILQNQGN

SEQ ID NO: 278 - protein, 377 aa, Chlorocebus sabaeus
MNPQIRNMVEQMEPDIFVYYFNNRPILSGRNTVWLCYEVKTKDPSGPPLDANIFQGKLYPEAKDHPEMKFLHWFRKWRQLHRDQEYEVTWYVSWSPCTRCANSVATFLAEDPKVTLTIFVARLYYFWKPDYQQALRILCQERGGPHATMKIMNYNEFQHCWNEFVDGQGKPFKPRKNLPKHYTLLHATLGELLRHVMDPGTFTSNFNNKPWVSGQRETYLCYKVERSHNDTWVLLNQHRGFLRNQAPDRHGFPKGRHAELCFLDLIPFWKLDDQQYRVTCFTSWSPCFSCAQKMAKFISNNKHVSLCIFAARIYDDQGRCQEGLRTLHRDGAKIAVMNYSEFEYCWDTFVDRQGRPFQPWDGLDEHSQALSGRLRAI

SEQ ID NO: 279 - protein, 384 aa, Homo sapiens
MKPHFRNTVERMYRDTFSYNFYNRPILSRRNTVWLCYEVKTKGPSRPPLDAKIFRGQVYSELKYHPEMRFFHWFSKWRKLHRDQEYEVTWYISWSPCTKCTRDMATFLAEDPKVTLTIFVARLYYFWDPDYQEALRSLCQKRDGPRATMKIMNYDEFQHCWSKFVYSQRELFEPWNNLPKYYILLHIMLGEILRHSMDPPTFTFNFNNEPWVRGRHETYLCYEVERMHNDTWVLLNQRRGFLCNQAPHKHGFLEGRHAELCFLDVIPFWKLDLDQDYRVTCFTSWSPCFSCAQEMAKFISKNKHVSLCIFTARIYDDQGRCQEGLRTLAEAGAKISIMTYSEFKHCWDTFVDHQGCPFQPWDGLDEHSQDLSGRLRAILQNQEN

SEQ ID NO: 280 - protein, 373 aa, Homo sapiens
MKPHFRNTVERMYRDTFSYNFYNRPILSRRNTVWLCYEVKTKGPSRPRLDAKIFRGQVYSQPEHHAEMCFLSWFCGNQLPAYKCFQITWFVSWTPCPDCVAKLAEFLAEHPNVTLTISAARLYYYWERDYRRALCRLSQAGARVKIMDDEEFAYCWENFVYSEGQPFMPWYKFDDNYAFLHRTLKEILRNPMEAMYPHIFYFHFKNLRKAYGRNESWLCFTMEVVKHHSPVSWKRGVFRNQVDPETHCHAERCFLSWFCDDILSPNTNYEVTWYTSWSPCPECAGEVAEFLARHSNVNLTIFTARLYYFWDTDYQEGLRSLSQEGASVEIMGYKDFKYCWENFVYNDDEPFKPWKGLKYNFLFLDSKLQEILE

SEQ ID NO: 281 - protein, 382 aa, Homo sapiens
MNPQIRNPMERMYRDTFYDNFENEPILYGRSYTWLCYEVKIKRGRSNLLWDTGVFRGQVYFKPQYHAEMCFLSWFCGNQLPAYKCFQITWFVSWTPCPDCVAKLAEFLSEHPNVTLTISAARLYYYWERDYRRALCRLSQAGARVTIMDYEEFAYCWENFVYNEGQQFMPWYKFDENYAFLHRTLKEILRYLMDPDTFTFNFNNDPLVLRRRQTYLCYEVERLDNGTWVLMDQHMGFLCNEAKNLLCGFYGRHAELRFLDLVPSLQLDPAQIYRVTWFISWSPCFSWGCAGEVRAFLQENTHVRLRIFAARIYDYDPLYKEALQMLRDAGAQVSIMTYDEFEYCWDTFVYRQGCPFQPWDGLEEHSQALSGRLRAILQNQGN

SEQ ID NO: 282 - protein, 190 aa, Homo sapiens
MNPQIRNPMKAMYPGTFYFQFKNLWEANDRNETWLCFTVEGIKRRSVVSWKTGVFRNQVDSETHCHAERCFLSWFCDDILSPNTKYQVTWYTSWSPCPDCAGEVAEFLARHSNVNLTIFTARLYYFQYPCYQEGLRSLSQEGVAVEIMDYEDFKYCWENFVYNDNEPFKPWKGLKTNFRLLKRRLRESLQ

SEQ ID NO: 283 - protein, 199 aa, Homo sapiens
MEASPASGPRHLMDPHIFTSNFNNGIGRHKTYLCYEVERLDNGTSVKMDQHRGFLHNQAKNLLCGFYGRHAELRFLDLVPSLQLDPAQIYRVTWFISWSPCFSWGCAGEVRAFLQENTHVRLRIFAARIYDYDPLYKEALQMLRDAGAQVSIMTYDEFKHCWDTFVDHQGCPFQPWDGLDEHSQALSGRLRAILQNQGN

SEQ ID NO: 284 - protein, 200 aa, Homo sapiens
MALLTAETFRLQFNNKRRLRRPYYPRKALLCYQLTPQNGSTPTRGYFENKKKCHAEICFINEIKSMGLDETQCYQVTCYLTWSPCSSCAWELVDFIKAHDHLNLGIFASRLYYHWCKPQQKGLRLLCGSQVPVEVMGFPKFADCWENFVDHEKPLSFNPYKMLEELDKNSRAIKRRLERIKIPGVRAQGRYMDILCDAEV

SEQ ID NO: 285 - protein, 386 aa, Homo sapiens
MNPQIRNPMERMYRDTFYDNFENEPILYGRSYTWLCYEVKIKRGRSNLLWDTGVFRGPVLPKRQSNHRQEVYFRFENHAEMCFLSWFCGNRLPANRRFQITWFVSWNPCLPCVVKVTKFLAEHPNVTLTISAARLYYYRDRDWRWVLLRLHKAGARVKIMDYEDFAYCWENFVCNEGQPFMPWYKFDDNYASLHRTLKEILRNPMEAMYPHIFYFHFKNLLKACGRNESWLCFTMEVTKHHSAVFRKRGVFRNQVDPETHCHAERCFLSWFCDDILSPNTNYEVTWYTSWSPCPECAGEVAEFLARHSNVNLTIFTARLCYFWDTDYQEGLCSLSQEGASVKIMGYKDFVSCWKNFVYSDDEPFKPWKGLQTNFRLLKRRLREILQ

SEQ ID NO: 286 - protein, 236 aa, Homo sapiens
MTSEKGPSTGDPTLRRRIEPWEFDVFYDPRELRKEACLLYEIKWGMSRKIWRSSGKNTTNHVEVNFIKKFTSERDFHPSMSCSITWFLSWSPCWECSQAIREFLSRHPGVTLVIYVARLFWHMDQQNRQGLRDLVNSGVTIQIMRASEYYHCWRNFVNYPPGDEAHWPQYPPLWMMLYALELHCIILSLPPCLKISRRWQNHLTFFRLHLQNCHYQTIPPHILLATGLIHPSVAWR

SEQ ID NO: 287 - protein, 229 aa, Mus musculus
MSSETGPVAVDPTLRRRIEPHEFEVFFDPRELRKETCLLYEINWGGRHSVWRHTSQNTSNHVEVNFLEKFTTERYFRPNTRCSITWFLSWSPCGECSRAITEFLSRHPYVTLFIYIARLYHHTDQRNRQGLRDLISSGVTIQIMTEQEYCYCWRNFVNYPPSNEAYWPRYPHLWVKLYVLELYCIILGLPPCLKILRRKQPQLTFFTITLQTCHYQRIPPHLLWATGLK

SEQ ID NO: 288 - protein, 229 aa, Rattus norvegicus [sequence omitted]

SEQ ID NO: 289 - protein, 208 aa, Petromyzon marinus
MTDAEYVRIHEKLDIYTFKKQFFNNKKSVSHRCYVLFELKRRGERRACFWGYAVNKPQSGTERGIHAEIFSIRKVEEYLRDNPGQFTINWYSSWSPCADCAEKILEWYNQELRGNGHTLKIWACKLYYEKNARNQIGLWNLRDNGVGLNVMVSEHYQCCRKIFIQSSHNQLNENRWLEKTLKRAEKRRSELSIMIQVKILHTTKSPAV

SEQ ID NO: 290 - protein, 384 aa, Homo sapiens
MKPHFRNTVERMYRDTFSYNFYNRPILSRRNTVWLCYEVKTKGPSRPPLDAKIFRGQVYSELKYHPEMRFFHWFSKWRKLHRDQEYEVTWYISWSPCTKCTRDMATFLAEDPKVTLTIFVARLYYFWDPDYQEALRSLCQKRDGPRATMKIMNYDEFQHCWSKFVYSQRELFEPWNNLPKYYILLHIMLGEILRHSMDPPTFTFNFNNEPWVRGRHETYLCYEVERMHNDTWVLLNQRRGFLCNQAPHKHGFLEGRHAELCFLDVIPFWKLDLDQDYRVTCFTSWSPCFSCAQEMAKFISKNKHVSLCIFTARIYRRQGRCQEGLRTLAEAGAKISIMTYSEFKHCWDTFVDHQGCPFQPWDGLDEHSQDLSGRLRAILQNQEN

SEQ ID NO: 291 - protein, 184 aa, Homo sapiens
MDPPTFTFNFNNEPWVRGRHETYLCYEVERMHNDTWVLLNQRRGFLCNQAPHKHGFLEGRHAELCFLDVIPFWKLDLDQDYRVTCFTSWSPCFSCAQEMAKFISKNKHVSLCIFTARIYDDQGRCQEGLRTLAEAGAKISIMTYSEFKHCWDTFVDHQGCPFQPWDGLDEHSQDLSGRLRAILQ

SEQ ID NO: 292 - protein, 184 aa, Homo sapiens
MDPPTFTFNFNNEPWVRGRHETYLCYEVERMHNDTWVLLNQRRGFLCNQAPHKHGFLEGRHAELCFLDVIPFWKLDLDQDYRVTCFTSWSPCFSCAQEMAKFISKNKHVSLCIFTARIYRRQGRCQEGLRTLAEAGAKISIMTYSEFKHCWDTFVDHQGCPFQPWDGLDEHSQDLSGRLRAILQ

SEQ ID NO: 293 - protein, 1633 aa, Artificial Sequence
  Synthetic polypeptide
MGSSHHHHHHMSSETGPVAVDPTLRRRIEPHEFEVFFDPRELRKETCLLYEINWGGRHSIWRHTSQNTNKHVEVNFIEKFTTERYFCPNTRCSITWFLSWSPCGECSRAITEFLSRYPHVTLFIYIARLYHHADPRNRQGLRDLISSGVTIQIMTEQESGYCWRNFVNYSPSNEAHWPRYPHLWVRLYVLELYCIILGLPPCLNILRRKQPQLTFFTIALQSCHYQRLPPHILWATGLKSGSETPGTSESATPESDKKYSIGLAIGTNSVGWAVITDEYKVPSKKFKVLGNTDRHSIKKNLIGALLFDSGETAEATRLKRTARRRYTRRKNRICYLQEIFSNEMAKVDDSFFHRLEESFLVEEDKKHERHPIFGNIVDEVAYHEKYPTIYHLRKKLVDSTDKADLRLIYLALAHMIKFRGHFLIEGDLNPDNSDVDKLFIQLVQTYNQLFEENPINASGVDAKAILSARLSKSRRLENLIAQLPGEKKNGLFGNLIALSLGLTPNFKSNFDLAEDAKLQLSKDTYDDDLDNLLAQIGDQYADLFLAAKNLSDAILLSDILRVNTEITKAPLSASMIKRYDEHHQDLTLLKALVRQQLPEKYKEIFFDQSKNGYAGYIDGGASQEEFYKFIKPILEKMDGTEELLVKLNREDLLRKQRTFDNGSIPHQIHLGELHAILRRQEDFYPFLKDNREKIEKILTFRIPYYVGPLARGNSRFAWMTRKSEETITPWNFEEVVDKGASAQSFIERMTNFDKNLPNEKVLPKHSLLYEYFTVYNELTKVKYVTEGMRKPAFLSGEQKKAIVDLLFKTNRKVTVKQLKEDYFKKIECFDSVEISGVEDRFNASLGTYHDLLKIIKDKDFLDNEENEDILEDIVLTLTLFEDREMIEERLKTYAHLFDDKVMKQLKRRRYTGWGRLSRKLINGIRDKQSGKTILDFLKSDGFANRNFMQLIHDDSLTFKEDIQKAQVSGQGDSLHEHIANLAGSPAIKKGILQTVKVVDELVKVMGRHKPENIVIEMARENQTTQKGQKNSRERMKRIEEGIKELGSQILKEHPVENTQLQNEKLYLYYLQNGRDMYVDQELDINRLSDYDVDAIVPQSFLKDDSIDNKVLTRSDKNRGKSDNVPSEEVVKKMKNYWRQLLNAKLITQRKFDNLTKAERGGLSELDKAGFIKRQLVETRQITKHVAQILDSRMNTKYDENDKLIREVKVITLKSKLVSDFRKDFQFYKVREINNYHHAHDAYLNAVVGTALIKKYPKLESEFVYGDYKVYDVRKMIAKSEQEIGKATAKYFFYSNIMNFFKTEITLANGEIRKRPLIETNGETGEIVWDKGRDFATVRKVLSMPQVNIVKKTEVQTGGFSKESILPKRNSDKLIARKKDWDPKKYGGFDSPTVAYSVLVVAKVEKGKSKKLKSVKELLGITIMERSSFEKNPIDFLEAKGYKEVKKDLIIKLPKYSLFELENGRKRMLASAGELQKGNELALPSKYVNFLYLASHYEKLKGSPEDNEQKQLFVEQHKHYLDEIIEQISEFSKRVILADANLDKVLSAYNKHRDKPIREQAENIIHLFTLTNLGAPAAFKYFDTTIDRKRYTSTKEVLDATLIHQSITGLYETRIDLSQLGGDSGGSPKKKRKV

SEQ ID NO: 294 - protein, 1623 aa, Artificial Sequence
  Synthetic polypeptide
MSSETGPVAVDPTLRRRIEPHEFEVFFDPRELRKETCLLYEINWGGRHSIWRHTSQNTNKHVEVNFIEKFTTERYFCPNTRCSITWFLSWSPCGECSRAITEFLSRYPHVTLFIYIARLYHHADPRNRQGLRDLISSGVTIQIMTEQESGYCWRNFVNYSPSNEAHWPRYPHLWVRLYVLELYCIILGLPPCLNILRRKQPQLTFFTIALQSCHYQRLPPHILWATGLKSGSETPGTSESATPESDKKYSIGLAIGTNSVGWAVITDEYKVPSKKFKVLGNTDRHSIKKNLIGALLFDSGETAEATRLKRTARRRYTRRKNRICYLQEIFSNEMAKVDDSFFHRLEESFLVEEDKKHERHPIFGNIVDEVAYHEKYPTIYHLRKKLVDSTDKADLRLIYLALAHMIKFRGHFLIEGDLNPDNSDVDKLFIQLVQTYNQLFEENPINASGVDAKAILSARLSKSRRLENLIAQLPGEKKNGLFGNLIALSLGLTPNFKSNFDLAEDAKLQLSKDTYDDDLDNLLAQIGDQYADLFLAAKNLSDAILLSDILRVNTEITKAPLSASMIKRYDEHHQDLTLLKALVRQQLPEKYKEIFFDQSKNGYAGYIDGGASQEEFYKFIKPILEKMDGTEELLVKLNREDLLRKQRTFDNGSIPHQIHLGELHAILRRQEDFYPFLKDNREKIEKILTFRIPYYVGPLARGNSRFAWMTRKSEETITPWNFEEVVDKGASAQSFIERMTNFDKNLPNEKVLPKHSLLYEYFTVYNELTKVKYVTEGMRKPAFLSGEQKKAIVDLLFKTNRKVTVKQLKEDYFKKIECFDSVEISGVEDRFNASLGTYHDLLKIIKDKDFLDNEENEDILEDIVLTLTLFEDREMIEERLKTYAHLFDDKVMKQLKRRRYTGWGRLSRKLINGIRDKQSGKTILDFLKSDGFANRNFMQLIHDDSLTFKEDIQKAQVSGQGDSLHEHIANLAGSPAIKKGILQTVKVVDELVKVMGRHKPENIVIEMARENQTTQKGQKNSRERMKRIEEGIKELGSQILKEHPVENTQLQNEKLYLYYLQNGRDMYVDQELDINRLSDYDVDAIVPQSFLKDDSIDNKVLTRSDKNRGKSDNVPSEEVVKKMKNYWRQLLNAKLITQRKFDNLTKAERGGLSELDKAGFIKRQLVETRQITKHVAQILDSRMNTKYDENDKLIREVKVITLKSKLVSDFRKDFQFYKVREINNYHHAHDAYLNAVVGTALIKKYPKLESEFVYGDYKVYDVRKMIAKSEQEIGKATAKYFFYSNIMNFFKTEITLANGEIRKRPLIETNGETGEIVWDKGRDFATVRKVLSMPQVNIVKKTEVQTGGFSKESILPKRNSDKLIARKKDWDPKKYGGFDSPTVAYSVLVVAKVEKGKSKKLKSVKELLGITIMERSSFEKNPIDFLEAKGYKEVKKDLIIKLPKYSLFELENGRKRMLASAGELQKGNELALPSKYVNFLYLASHYEKLKGSPEDNEQKQLFVEQHKHYLDEIIEQISEFSKRVILADANLDKVLSAYNKHRDKPIREQAENIIHLFTLTNLGAPAAFKYFDTTIDRKRYTSTKEVLDATLIHQSITGLYETRIDLSQLGGDSGGSPKKKRKV

SEQ ID NO: 295 - protein, 1630 aa, Artificial Sequence
  Synthetic polypeptide
MTSEKGPSTGDPTLRRRIEPWEFDVFYDPRELRKEACLLYEIKWGMSRKIWRSSGKNTTNHVEVNFIKKFTSERDFHPSMSCSITWFLSWSPCWECSQAIREFLSRHPGVTLVIYVARLFWHMDQQNRQGLRDLVNSGVTIQIMRASEYYHCWRNFVNYPPGDEAHWPQYPPLWMMLYALELHCIILSLPPCLKISRRWQNHLTFFRLHLQNCHYQTIPPHILLATGLIHPSVAWRSGSETPGTSESATPESDKKYSIGLAIGTNSVGWAVITDEYKVPSKKFKVLGNTDRHSIKKNLIGALLFDSGETAEATRLKRTARRRYTRRKNRICYLQEIFSNEMAKVDDSFFHRLEESFLVEEDKKHERHPIFGNIVDEVAYHEKYPTIYHLRKKLVDSTDKADLRLIYLALAHMIKFRGHFLIEGDLNPDNSDVDKLFIQLVQTYNQLFEENPINASGVDAKAILSARLSKSRRLENLIAQLPGEKKNGLFGNLIALSLGLTPNFKSNFDLAEDAKLQLSKDTYDDDLDNLLAQIGDQYADLFLAAKNLSDAILLSDILRVNTEITKAPLSASMIKRYDEHHQDLTLLKALVRQQLPEKYKEIFFDQSKNGYAGYIDGGASQEEFYKFIKPILEKMDGTEELLVKLNREDLLRKQRTFDNGSIPHQIHLGELHAILRRQEDFYPFLKDNREKIEKILTFRIPYYVGPLARGNSRFAWMTRKSEETITPWNFEEVVDKGASAQSFIERMTNFDKNLPNEKVLPKHSLLYEYFTVYNELTKVKYVTEGMRKPAFLSGEQKKAIVDLLFKTNRKVTVKQLKEDYFKKIECFDSVEISGVEDRFNASLGTYHDLLKIIKDKDFLDNEENEDILEDIVLTLTLFEDREMIEERLKTYAHLFDDKVMKQLKRRRYTGWGRLSRKLINGIRDKQSGKTILDFLKSDGFANRNFMQLIHDDSLTFKEDIQKAQVSGQGDSLHEHIANLAGSPAIKKGILQTVKVVDELVKVMGRHKPENIVIEMARENQTTQKGQKNSRERMKRIEEGIKELGSQILKEHPVENTQLQNEKLYLYYLQNGRDMYVDQELDINRLSDYDVDAIVPQSFLKDDSIDNKVLTRSDKNRGKSDNVPSEEVVKKMKNYWRQLLNAKLITQRKFDNLTKAERGGLSELDKAGFIKRQLVETRQITKHVAQILDSRMNTKYDENDKLIREVKVITLKSKLVSDFRKDFQFYKVREINNYHHAHDAYLNAVVGTALIKKYPKLESEFVYGDYKVYDVRKMIAKSEQEIGKATAKYFFYSNIMNFFKTEITLANGEIRKRPLIETNGETGEIVWDKGRDFATVRKVLSMPQVNIVKKTEVQTGGFSKESILPKRNSDKLIARKKDWDPKKYGGFDSPTVAYSVLVVAKVEKGKSKKLKSVKELLGITIMERSSFEKNPIDFLEAKGYKEVKKDLIIKLPKYSLFELENGRKRMLASAGELQKGNELALPSKYVNFLYLASHYEKLKGSPEDNEQKQLFVEQHKHYLDEIIEQISEFSKRVILADANLDKVLSAYNKHRDKPIREQAENIIHLFTLTNLGAPAAFKYFDTTIDRKRYTSTKEVLDATLIHQSITGLYETRIDLSQLGGDSGGSPKKKRKV

SEQ ID NO: 296 - protein, 1710 aa, Artificial Sequence
  Synthetic polypeptide
MSSETGPVAVDPTLRRRIEPHEFEVFFDPRELRKETCLLYEINWGGRHSIWRHTSQNTNKHVEVNFIEKFTTERYFCPNTRCSITWFLSWSPCGECSRAITEFLSRYPHVTLFIYIARLYHHADPRNRQGLRDLISSGVTIQIMTEQESGYCWRNFVNYSPSNEAHWPRYPHLWVRLYVLELYCIILGLPPCLNILRRKQPQLTFFTIALQSCHYQRLPPHILWATGLKSGSETPGTSESATPESDKKYSIGLAIGTNSVGWAVITDEYKVPSKKFKVLGNTDRHSIKKNLIGALLFDSGETAEATRLKRTARRRYTRRKNRICYLQEIFSNEMAKVDDSFFHRLEESFLVEEDKKHERHPIFGNIVDEVAYHEKYPTIYHLRKKLVDSTDKADLRLIYLALAHMIKFRGHFLIEGDLNPDNSDVDKLFIQLVQTYNQLFEENPINASGVDAKAILSARLSKSRRLENLIAQLPGEKKNGLFGNLIALSLGLTPNFKSNFDLAEDAKLQLSKDTYDDDLDNLLAQIGDQYADLFLAAKNLSDAILLSDILRVNTEITKAPLSASMIKRYDEHHQDLTLLKALVRQQLPEKYKEIFFDQSKNGYAGYIDGGASQEEFYKFIKPILEKMDGTEELLVKLNREDLLRKQRTFDNGSIPHQIHLGELHAILRRQEDFYPFLKDNREKIEKILTFRIPYYVGPLARGNSRFAWMTRKSEETITPWNFEEVVDKGASAQSFIERMTNFDKNLPNEKVLPKHSLLYEYFTVYNELTKVKYVTEGMRKPAFLSGEQKKAIVDLLFKTNRKVTVKQLKEDYFKKIECFDSVEISGVEDRFNASLGTYHDLLKIIKDKDFLDNEENEDILEDIVLTLTLFEDREMIEERLKTYAHLFDDKVMKQLKRRRYTGWGRLSRKLINGIRDKQSGKTILDFLKSDGFANRNFMQLIHDDSLTFKEDIQKAQVSGQGDSLHEHIANLAGSPAIKKGILQTVKVVDELVKVMGRHKPENIVIEMARENQTTQKGQKNSRERMKRIEEGIKELGSQILKEHPVENTQLQNEKLYLYYLQNGRDMYVDQELDINRLSDYDVDAIVPQSFLKDDSIDNKVLTRSDKNRGKSDNVPSEEVVKKMKNYWRQLLNAKLITQRKFDNLTKAERGGLSELDKAGFIKRQLVETRQITKHVAQILDSRMNTKYDENDKLIREVKVITLKSKLVSDFRKDFQFYKVREINNYHHAHDAYLNAVVGTALIKKYPKLESEFVYGDYKVYDVRKMIAKSEQEIGKATAKYFFYSNIMNFFKTEITLANGEIRKRPLIETNGETGEIVWDKGRDFATVRKVLSMPQVNIVKKTEVQTGGFSKESILPKRNSDKLIARKKDWDPKKYGGFDSPTVAYSVLVVAKVEKGKSKKLKSVKELLGITIMERSSFEKNPIDFLEAKGYKEVKKDLIIKLPKYSLFELENGRKRMLASAGELQKGNELALPSKYVNFLYLASHYEKLKGSPEDNEQKQLFVEQHKHYLDEIIEQISEFSKRVILADANLDKVLSAYNKHRDKPIREQAENIIHLFTLTNLGAPAAFKYFDTTIDRKRYTSTKEVLDATLIHQSITGLYETRIDLSQLGGDSGGSTNLSDIIEKETGKQLVIQESILMLPEEVEEVIGNKPESDILVHTAYDESTDENVMLLTSDAPEYKPWALVIQDSNGENKIKMLSGGSPKKKRKV

SEQ ID NO: 297 - protein, 1710 aa, Artificial Sequence
  Synthetic polypeptide
MSSETGPVAVDPTLRRRIEPHEFEVFFDPRELRKETCLLYEINWGGRHSIWRHTSQNTNKHVEVNFIEKFTTERYFCPNTRCSITWFLSWSPCGECSRAITEFLSRYPHVTLFIYIARLYHHADPRNRQGLRDLISSGVTIQIMTEQESGYCWRNFVNYSPSNEAHWPRYPHLWVRLYVLELYCIILGLPPCLNILRRKQPQLTFFTIALQSCHYQRLPPHILWATGLKSGSETPGTSESATPESDKKYSIGLAIGTNSVGWAVITDEYKVPSKKFKVLGNTDRHSIKKNLIGALLFDSGETAEATRLKRTARRRYTRRKNRICYLQEIFSNEMAKVDDSFFHRLEESFLVEEDKKHERHPIFGNIVDEVAYHEKYPTIYHLRKKLVDSTDKADLRLIYLALAHMIKFRGHFLIEGDLNPDNSDVDKLFIQLVQTYNQLFEENPINASGVDAKAILSARLSKSRRLENLIAQLPGEKKNGLFGNLIALSLGLTPNFKSNFDLAEDAKLQLSKDTYDDDLDNLLAQIGDQYADLFLAAKNLSDAILLSDILRVNTEITKAPLSASMIKRYDEHHQDLTLLKALVRQQLPEKYKEIFFDQSKNGYAGYIDGGASQEEFYKFIKPILEKMDGTEELLVKLNREDLLRKQRTFDNGSIPHQIHLGELHAILRRQEDFYPFLKDNREKIEKILTFRIPYYVGPLARGNSRFAWMTRKSEETITPWNFEEVVDKGASAQSFIERMTNFDKNLPNEKVLPKHSLLYEYFTVYNELTKVKYVTEGMRKPAFLSGEQKKAIVDLLFKTNRKVTVKQLKEDYFKKIECFDSVEISGVEDRFNASLGTYHDLLKIIKDKDFLDNEENEDILEDIVLTLTLFEDREMIEERLKTYAHLFDDKVMKQLKRRRYTGWGRLSRKLINGIRDKQSGKTILDFLKSDGFANRNFMQLIHDDSLTFKEDIQKAQVSGQGDSLHEHIANLAGSPAIKKGILQTVKVVDELVKVMGRHKPENIVIEMARENQTTQKGQKNSRERMKRIEEGIKELGSQILKEHPVENTQLQNEKLYLYYLQNGRDMYVDQELDINRLSDYDVDHIVPQSFLKDDSIDNKVLTRSDKNRGKSDNVPSEEVVKKMKNYWRQLLNAKLITQRKFDNLTKAERGGLSELDKAGFIKRQLVETRQITKHVAQILDSRMNTKYDENDKLIREVKVITLKSKLVSDFRKDFQFYKVREINNYHHAHDAYLNAVVGTALIKKYPKLESEFVYGDYKVYDVRKMIAKSEQEIGKATAKYFFYSNIMNFFKTEITLANGEIRKRPLIETNGETGEIVWDKGRDFATVRKVLSMPQVNIVKKTEVQTGGFSKESILPKRNSDKLIARKKDWDPKKYGGFDSPTVAYSVLVVAKVEKGKSKKLKSVKELLGITIMERSSFEKNPIDFLEAKGYKEVKKDLIIKLPKYSLFELENGRKRMLASAGELQKGNELALPSKYVNFLYLASHYEKLKGSPEDNEQKQLFVEQHKHYLDEIIEQISEFSKRVILADANLDKVLSAYNKHRDKPIREQAENIIHLFTLTNLGAPAAFKYFDTTIDRKRYTSTKEVLDATLIHQSITGLYETRIDLSQLGGDSGGSTNLSDIIEKETGKQLVIQESILMLPEEVEEVIGNKPESDILVHTAYDESTDENVMLLTSDAPEYKPWALVIQDSNGENKIKMLSGGSPKKKRKV

SEQ ID NO: 298 - protein, 1679 aa, Artificial Sequence
  Synthetic polypeptide
MTDAEYVRIHEKLDIYTFKKQFFNNKKSVSHRCYVLFELKRRGERRACFWGYAVNKPQSGTERGIHAEIFSIRKVEEYLRDNPGQFTINWYSSWSPCADCAEKILEWYNQELRGNGHTLKIWACKLYYEKNARNQIGLWNLRDNGVGLNVMVSEHYQCCRKIFIQSSHNQLNENRWLEKTLKRAEKRRSELSIMIQVKILHTTKSPAVSGSETPGTSESATPESDKKYSIGLAIGTNSVGWAVITDEYKVPSKKFKVLGNTDRHSIKKNLIGALLFDSGETAEATRLKRTARRRYTRRKNRICYLQEIFSNEMAKVDDSFFHRLEESFLVEEDKKHERHPIFGNIVDEVAYHEKYPTIYHLRKKLVDSTDKADLRLIYLALAHMIKFRGHFLIEGDLNPDNSDVDKLFIQLVQTYNQLFEENPINASGVDAKAILSARLSKSRRLENLIAQLPGEKKNGLFGNLIALSLGLTPNFKSNFDLAEDAKLQLSKDTYDDDLDNLLAQIGDQYADLFLAAKNLSDAILLSDILRVNTEITKAPLSASMIKRYDEHHQDLTLLKALVRQQLPEKYKEIFFDQSKNGYAGYIDGGASQEEFYKFIKPILEKMDGTEELLVKLNREDLLRKQRTFDNGSIPHQIHLGELHAILRRQEDFYPFLKDNREKIEKILTFRIPYYVGPLARGNSRFAWMTRKSEETITPWNFEEVVDKGASAQSFIERMTNFDKNLPNEKVLPKHSLLYEYFTVYNELTKVKYVTEGMRKPAFLSGEQKKAIVDLLFKTNRKVTVKQLKEDYFKKIECFDSVEISGVEDRFNASLGTYHDLLKIIKDKDFLDNEENEDILEDIVLTLTLFEDREMIEERLKTYAHLFDDKVMKQLKRRRYTGWGRLSRKLINGIRDKQSGKTILDFLKSDGFANRNFMQLIHDDSLTFKEDIQKAQVSGQGDSLHEHIANLAGSPAIKKGILQTVKVVDELVKVMGRHKPENIVIEMARENQTTQKGQKNSRERMKRIEEGIKELGSQILKEHPVENTQLQNEKLYLYYLQNGRDMYVDQELDINRLSDYDVDAIVPQSFLKDDSIDNKVLTRSDKNRGKSDNVPSEEVVKKMKNYWRQLLNAKLITQRKFDNLTKAERGGLSELDKAGFIKRQLVETRQITKHVAQILDSRMNTKYDENDKLIREVKVITLKSKLVSDFRKDFQFYKVREINNYHHAHDAYLNAVVGTALIKKYPKLESEFVYGDYKVYDVRKMIAKSEQEIGKATAKYFFYSNIMNFFKTEITLANGEIRKRPLIETNGETGEIVWDKGRDFATVRKVLSMPQVNIVKKTEVQTGGFSKESILPKRNSDKLIARKKDWDPKKYGGFDSPTVAYSVLVVAKVEKGKSKKLKSVKELLGITIMERSSFEKNPIDFLEAKGYKEVKKDLIIKLPKYSLFELENGRKRMLASAGELQKGNELALPSKYVNFLYLASHYEKLKGSPEDNEQKQLFVEQHKHYLDEIIEQISEFSKRVILADANLDKVLSAYNKHRDKPIREQAENIIHLFTLTNLGAPAAFKYFDTTIDRKRYTSTKEVLDATLIHQSITGLYETRIDLSQLGGDSGGSMTNLSDIIEKETGKQLVIQESILMLPEEVEEVIGNKPESDILVHTAYDESTDENVMLLTSDAPEYKPWALVIQDSNGENKIKML

SEQ ID NO: 299 - protein, 1689 aa, Artificial Sequence
  Synthetic polypeptide
MTDAEYVRIHEKLDIYTFKKQFFNNKKSVSHRCYVLFELKRRGERRACFWGYAVNKPQSGTERGIHAEIFSIRKVEEYLRDNPGQFTINWYSSWSPCADCAEKILEWYNQELRGNGHTLKIWACKLYYEKNARNQIGLWNLRDNGVGLNVMVSEHYQCCRKIFIQSSHNQLNENRWLEKTLKRAEKRRSELSIMIQVKILHTTKSPAVSGSETPGTSESATPESDKKYSIGLAIGTNSVGWAVITDEYKVPSKKFKVLGNTDRHSIKKNLIGALLFDSGETAEATRLKRTARRRYTRRKNRICYLQEIFSNEMAKVDDSFFHRLEESFLVEEDKKHERHPIFGNIVDEVAYHEKYPTIYHLRKKLVDSTDKADLRLIYLALAHMIKFRGHFLIEGDLNPDNSDVDKLFIQLVQTYNQLFEENPINASGVDAKAILSARLSKSRRLENLIAQLPGEKKNGLFGNLIALSLGLTPNFKSNFDLAEDAKLQLSKDTYDDDLDNLLAQIGDQYADLFLAAKNLSDAILLSDILRVNTEITKAPLSASMIKRYDEHHQDLTLLKALVRQQLPEKYKEIFFDQSKNGYAGYIDGGASQEEFYKFIKPILEKMDGTEELLVKLNREDLLRKQRTFDNGSIPHQIHLGELHAILRRQEDFYPFLKDNREKIEKILTFRIPYYVGPLARGNSRFAWMTRKSEETITPWNFEEVVDKGASAQSFIERMTNFDKNLPNEKVLPKHSLLYEYFTVYNELTKVKYVTEGMRKPAFLSGEQKKAIVDLLFKTNRKVTVKQLKEDYFKKIECFDSVEISGVEDRFNASLGTYHDLLKIIKDKDFLDNEENEDILEDIVLTLTLFEDREMIEERLKTYAHLFDDKVMKQLKRRRYTGWGRLSRKLINGIRDKQSGKTILDFLKSDGFANRNFMQLIHDDSLTFKEDIQKAQVSGQGDSLHEHIANLAGSPAIKKGILQTVKVVDELVKVMGRHKPENIVIEMARENQTTQKGQKNSRERMKRIEEGIKELGSQILKEHPVENTQLQNEKLYLYYLQNGRDMYVDQELDINRLSDYDVDHIVPQSFLKDDSIDNKVLTRSDKNRGKSDNVPSEEVVKKMKNYWRQLLNAKLITQRKFDNLTKAERGGLSELDKAGFIKRQLVETRQITKHVAQILDSRMNTKYDENDKLIREVKVITLKSKLVSDFRKDFQFYKVREINNYHHAHDAYLNAVVGTALIKKYPKLESEFVYGDYKVYDVRKMIAKSEQEIGKATAKYFFYSNIMNFFKTEITLANGEIRKRPLIETNGETGEIVWDKGRDFATVRKVLSMPQVNIVKKTEVQTGGFSKESILPKRNSDKLIARKKDWDPKKYGGFDSPTVAYSVLVVAKVEKGKSKKLKSVKELLGITIMERSSFEKNPIDFLEAKGYKEVKKDLIIKLPKYSLFELENGRKRMLASAGELQKGNELALPSKYVNFLYLASHYEKLKGSPEDNEQKQLFVEQHKHYLDEIIEQISEFSKRVILADANLDKVLSAYNKHRDKPIREQAENIIHLFTLTNLGAPAAFKYFDTTIDRKRYTSTKEVLDATLIHQSITGLYETRIDLSQLGGDSGGSTNLSDIIEKETGKQLVIQESILMLPEEVEEVIGNKPESDILVHTAYDESTDENVMLLTSDAPEYKPWALVIQDSNGENKIKMLSGGSPKKKRKV

SEQ ID NO: 300 - protein, 1655 aa, Artificial Sequence
  Synthetic polypeptide
MDPPTFTFNFNNEPWVRGRHETYLCYEVERMHNDTWVLLNQRRGFLCNQAPHKHGFLEGRHAELCFLDVIPFWKLDLDQDYRVTCFTSWSPCFSCAQEMAKFISKNKHVSLCIFTARIYDDQGRCQEGLRTLAEAGAKISIMTYSEFKHCWDTFVDHQGCPFQPWDGLDEHSQDLSGRLRAILQSGSETPGTSESATPESDKKYSIGLAIGTNSVGWAVITDEYKVPSKKFKVLGNTDRHSIKKNLIGALLFDSGETAEATRLKRTARRRYTRRKNRICYLQEIFSNEMAKVDDSFFHRLEESFLVEEDKKHERHPIFGNIVDEVAYHEKYPTIYHLRKKLVDSTDKADLRLIYLALAHMIKFRGHFLIEGDLNPDNSDVDKLFIQLVQTYNQLFEENPINASGVDAKAILSARLSKSRRLENLIAQLPGEKKNGLFGNLIALSLGLTPNFKSNFDLAEDAKLQLSKDTYDDDLDNLLAQIGDQYADLFLAAKNLSDAILLSDILRVNTEITKAPLSASMIKRYDEHHQDLTLLKALVRQQLPEKYKEIFFDQSKNGYAGYIDGGASQEEFYKFIKPILEKMDGTEELLVKLNREDLLRKQRTFDNGSIPHQIHLGELHAILRRQEDFYPFLKDNREKIEKILTFRIPYYVGPLARGNSRFAWMTRKSEETITPWNFEEVVDKGASAQSFIERMTNFDKNLPNEKVLPKHSLLYEYFTVYNELTKVKYVTEGMRKPAFLSGEQKKAIVDLLFKTNRKVTVKQLKEDYFKKIECFDSVEISGVEDRFNASLGTYHDLLKIIKDKDFLDNEENEDILEDIVLTLTLFEDREMIEERLKTYAHLFDDKVMKQLKRRRYTGWGRLSRKLINGIRDKQSGKTILDFLKSDGFANRNFMQLIHDDSLTFKEDIQKAQVSGQGDSLHEHIANLAGSPAIKKGILQTVKVVDELVKVMGRHKPENIVIEMARENQTTQKGQKNSRERMKRIEEGIKELGSQILKEHPVENTQLQNEKLYLYYLQNGRDMYVDQELDINRLSDYDVDAIVPQSFLKDDSIDNKVLTRSDKNRGKSDNVPSEEVVKKMKNYWRQLLNAKLITQRKFDNLTKAERGGLSELDKAGFIKRQLVETRQITKHVAQILDSRMNTKYDENDKLIREVKVITLKSKLVSDFRKDFQFYKVREINNYHHAHDAYLNAVVGTALIKKYPKLESEFVYGDYKVYDVRKMIAKSEQEIGKATAKYFFYSNIMNFFKTEITLANGEIRKRPLIETNGETGEIVWDKGRDFATVRKVLSMPQVNIVKKTEVQTGGFSKESILPKRNSDKLIARKKDWDPKKYGGFDSPTVAYSVLVVAKVEKGKSKKLKSVKELLGITIMERSSFEKNPIDFLEAKGYKEVKKDLIIKLPKYSLFELENGRKRMLASAGELQKGNELALPSKYVNFLYLASHYEKLKGSPEDNEQKQLFVEQHKHYLDEIIEQISEFSKRVILADANLDKVLSAYNKHRDKPIREQAENIIHLFTLTNLGAPAAFKYFDTTIDRKRYTSTKEVLDATLIHQSITGLYETRIDLSQLGGDSGGSMTNLSDIIEKETGKQLVIQESILMLPEEVEEVIGNKPESDILVHTAYDESTDENVMLLTSDAPEYKPWALVIQDSNGENKIKML

SEQ ID NO: 301 - protein, 1665 aa, Artificial Sequence
  Synthetic polypeptide
MDPPTFTFNFNNEPWVRGRHETYLCYEVERMHNDTWVLLNQRRGFLCNQAPHKHGFLEGRHAELCFLDVIPFWKLDLDQDYRVTCFTSWSPCFSCAQEMAKFISKNKHVSLCIFTARIYDDQGRCQEGLRTLAEAGAKISIMTYSEFKHCWDTFVDHQGCPFQPWDGLDEHSQDLSGRLRAILQSGSETPGTSESATPESDKKYSIGLAIGTNSVGWAVITDEYKVPSKKFKVLGNTDRHSIKKNLIGALLFDSGETAEATRLKRTARRRYTRRKNRICYLQEIFSNEMAKVDDSFFHRLEESFLVEEDKKHERHPIFGNIVDEVAYHEKYPTIYHLRKKLVDSTDKADLRLIYLALAHMIKFRGHFLIEGDLNPDNSDVDKLFIQLVQTYNQLFEENPINASGVDAKAILSARLSKSRRLENLIAQLPGEKKNGLFGNLIALSLGLTPNFKSNFDLAEDAKLQLSKDTYDDDLDNLLAQIGDQYADLFLAAKNLSDAILLSDILRVNTEITKAPLSASMIKRYDEHHQDLTLLKALVRQQLPEKYKEIFFDQSKNGYAGYIDGGASQEEFYKFIKPILEKMDGTEELLVKLNREDLLRKQRTFDNGSIPHQIHLGELHAILRRQEDFYPFLKDNREKIEKILTFRIPYYVGPLARGNSRFAWMTRKSEETITPWNFEEVVDKGASAQSFIERMTNFDKNLPNEKVLPKHSLLYEYFTVYNELTKVKYVTEGMRKPAFLSGEQKKAIVDLLFKTNRKVTVKQLKEDYFKKIECFDSVEISGVEDRFNASLGTYHDLLKIIKDKDFLDNEENEDILEDIVLTLTLFEDREMIEERLKTYAHLFDDKVMKQLKRRRYTGWGRLSRKLINGIRDKQSGKTILDFLKSDGFANRNFMQLIHDDSLTFKEDIQKAQVSGQGDSLHEHIANLAGSPAIKKGILQTVKVVDELVKVMGRHKPENIVIEMARENQTTQKGQKNSRERMKRIEEGIKELGSQILKEHPVENTQLQNEKLYLYYLQNGRDMYVDQELDINRLSDYDVDHIVPQSFLKDDSIDNKVLTRSDKNRGKSDNVPSEEVVKKMKNYWRQLLNAKLITQRKFDNLTKAERGGLSELDKAGFIKRQLVETRQITKHVAQILDSRMNTKYDENDKLIREVKVITLKSKLVSDFRKDFQFYKVREINNYHHAHDAYLNAVVGTALIKKYPKLESEFVYGDYKVYDVRKMIAKSEQEIGKATAKYFFYSNIMNFFKTEITLANGEIRKRPLIETNGETGEIVWDKGRDFATVRKVLSMPQVNIVKKTEVQTGGFSKESILPKRNSDKLIARKKDWDPKKYGGFDSPTVAYSVLVVAKVEKGKSKKLKSVKELLGITIMERSSFEKNPIDFLEAKGYKEVKKDLIIKLPKYSLFELENGRKRMLASAGELQKGNELALPSKYVNFLYLASHYEKLKGSPEDNEQKQLFVEQHKHYLDEIIEQISEFSKRVILADANLDKVLSAYNKHRDKPIREQAENIIHLFTLTNLGAPAAFKYFDTTIDRKRYTSTKEVLDATLIHQSITGLYETRIDLSQLGGDSGGSTNLSDIIEKETGKQLVIQESILMLPEEVEEVIGNKPESDILVHTAYDESTDENVMLLTSDAPEYKPWALVIQDSNGENKIKMLSGGSPKKKRKV

SEQ ID NO: 302 - protein, 1665 aa, Artificial Sequence
  Synthetic polypeptide
MDPPTFTFNFNNEPWVRGRHETYLCYEVERMHNDTWVLLNQRRGFLCNQAPHKHGFLEGRHAELCFLDVIPFWKLDLDQDYRVTCFTSWSPCFSCAQEMAKFISKNKHVSLCIFTARIYRRQGRCQEGLRTLAEAGAKISIMTYSEFKHCWDTFVDHQGCPFQPWDGLDEHSQDLSGRLRAILQSGSETPGTSESATPESDKKYSIGLAIGTNSVGWAVITDEYKVPSKKFKVLGNTDRHSIKKNLIGALLFDSGETAEATRLKRTARRRYTRRKNRICYLQEIFSNEMAKVDDSFFHRLEESFLVEEDKKHERHPIFGNIVDEVAYHEKYPTIYHLRKKLVDSTDKADLRLIYLALAHMIKFRGHFLIEGDLNPDNSDVDKLFIQLVQTYNQLFEENPINASGVDAKAILSARLSKSRRLENLIAQLPGEKKNGLFGNLIALSLGLTPNFKSNFDLAEDAKLQLSKDTYDDDLDNLLAQIGDQYADLFLAAKNLSDAILLSDILRVNTEITKAPLSASMIKRYDEHHQDLTLLKALVRQQLPEKYKEIFFDQSKNGYAGYIDGGASQEEFYKFIKPILEKMDGTEELLVKLNREDLLRKQRTFDNGSIPHQIHLGELHAILRRQEDFYPFLKDNREKIEKILTFRIPYYVGPLARGNSRFAWMTRKSEETITPWNFEEVVDKGASAQSFIERMTNFDKNLPNEKVLPKHSLLYEYFTVYNELTKVKYVTEGMRKPAFLSGEQKKAIVDLLFKTNRKVTVKQLKEDYFKKIECFDSVEISGVEDRFNASLGTYHDLLKIIKDKDFLDNEENEDILEDIVLTLTLFEDREMIEERLKTYAHLFDDKVMKQLKRRRYTGWGRLSRKLINGIRDKQSGKTILDFLKSDGFANRNFMQLIHDDSLTFKEDIQKAQVSGQGDSLHEHIANLAGSPAIKKGILQTVKVVDELVKVMGRHKPENIVIEMARENQTTQKGQKNSRERMKRIEEGIKELGSQILKEHPVENTQLQNEKLYLYYLQNGRDMYVDQELDINRLSDYDVDHIVPQSFLKDDSIDNKVLTRSDKNRGKSDNVPSEEVVKKMKNYWRQLLNAKLITQRKFDNLTKAERGGLSELDKAGFIKRQLVETRQITKHVAQILDSRMNTKYDENDKLIREVKVITLKSKLVSDFRKDFQFYKVREINNYHHAHDAYLNAVVGTALIKKYPKLESEFVYGDYKVYDVRKMIAKSEQEIGKATAKYFFYSNIMNFFKTEITLANGEIRKRPLIETNGETGEIVWDKGRDFATVRKVLSMPQVNIVKKTEVQTGGFSKESILPKRNSDKLIARKKDWDPKKYGGFDSPTVAYSVLVVAKVEKGKSKKLKSVKELLGITIMERSSFEKNPIDFLEAKGYKEVKKDLIIKLPKYSLFELENGRKRMLASAGELQKGNELALPSKYVNFLYLASHYEKLKGSPEDNEQKQLFVEQHKHYLDEIIEQISEFSKRVILADANLDKVLSAYNKHRDKPIREQAENIIHLFTLTNLGAPAAFKYFDTTIDRKRYTSTKEVLDATLIHQSITGLYETRIDLSQLGGDSGGSTNLSDIIEKETGKQLVIQESILMLPEEVEEVIGNKPESDILVHTAYDESTDENVMLLTSDAPEYKPWALVIQDSNGENKIKMLSGGSPKKKRKV

SEQ ID NO: 303 - protein, 198 aa, Homo sapiens [sequence omitted]

SEQ ID NO: 304 - protein, 84 aa, Bacillus phage PBS2
MTNLSDIIEKETGKQLVIQESILMLPEEVEEVIGNKPESDILVHTAYDESTDENVMLLTSDAPEYKPWALVIQDSNGENKIKML

SEQ ID NO: 305 - protein, 181 aa, Erwinia tasmaniensis
MASRGVNKVILVGNLGQDPEVRYMPNGGAVANITLATSESWRDKQTGETKEKTEWHRVVLFGKLAEVAGEYLRKGSQVYIEGALQTRKWTDQAGVEKYTTEVVVNVGGTMQMLGGRSQGGGASAGGQNGGSNNGWGQPQQPQGGNQFSGGAQQQARPQQQPQQNNAPANNEPPIDFDDDIP

SEQ ID NO: 306 - protein, 209 aa, Artificial Sequence
  Synthetic polypeptide
MAGAQDFVPHTADLAELAAAAGECRGCGLYRDATQAVFGAGGRSARIMMIGEQPGDKEDLAGLPFVGPAGRLLDRALEAADIDRDALYVTNAVKHFKFTRAAGGKRRIHKTPSRTEVVACRPWLIAEMTSVEPDVVVLLGATAAKALLGNDFRVTQHRGEVLHVDDVPGDPALVATVHPSSLLRGPKEERESAFAGLVDDLRVAADVRP

SEQ ID NO: 307 - protein, 313 aa, Homo sapiens
MIGQKTLYSFFSPSPARKRHAPSPEPAVQGTGVAGVPEESGDAAAIPAKKAPAGQEEPGTPPSSPLSAEQLDRIQRNKAAALLRLAARNVPVGFGESWKKHLSGEFGKPYFIKLMGFVAEERKHYTVYPPPHQVFTWTQMCDIKDVKVVILGQEPYHGPNQAHGLCFSVQRPVPPPPSLENIYKELSTDIEDFVHPGHGDLSGWAKQGVLLLNAVLTVRAHQANSHKERGWEQFTDAVVSWLNQNSNGLVFLLWGSYAQKKGSAIDRKRHHVLQTAHPSPLSVYRGFFGCRHFSKTNELLQKSGKKPIDWKEL

SEQ ID NO: 308 - protein, 150 aa, Artificial Sequence
  Synthetic polypeptide
  MISC_FEATURE (6)..(150): May be absent
GGGGSGGGGSGGGGSGGGGSGGGGSGGGGSGGGGSGGGGSGGGGSGGGGSGGGGSGGGGSGGGGSGGGGSGGGGSGGGGSGGGGSGGGGSGGGGSGGGGSGGGGSGGGGSGGGGSGGGGSGGGGSGGGGSGGGGSGGGGSGGGGSGGGGS

SEQ ID NO: 309 - protein, 150 aa, Artificial Sequence
  Synthetic polypeptide
  MISC_FEATURE (6)..(150): May be absent
EAAAKEAAAKEAAAKEAAAKEAAAKEAAAKEAAAKEAAAKEAAAKEAAAKEAAAKEAAAKEAAAKEAAAKEAAAKEAAAKEAAAKEAAAKEAAAKEAAAKEAAAKEAAAKEAAAKEAAAKEAAAKEAAAKEAAAKEAAAKEAAAKEAAAK

SEQ ID NO: 310 - protein, 16 aa, Artificial Sequence
  Synthetic polypeptide
SGSETPGTSESATPES

SEQ ID NO: 311 - protein, 15 aa, Artificial Sequence
  Synthetic polypeptide
VPFLLEPDNINGKTC

SEQ ID NO: 312 - protein, 12 aa, Artificial Sequence
  Synthetic polypeptide
GSAGSAAGSGEF

SEQ ID NO: 313 - protein, 12 aa, Artificial Sequence
  Synthetic polypeptide
SIVAQLSRPDPA

SEQ ID NO: 314 - protein, 10 aa, Artificial Sequence
  Synthetic polypeptide
MKIIEQLPSA

SEQ ID NO: 315 - protein, 10 aa, Artificial Sequence
  Synthetic polypeptide
VRHKLKRVGS

SEQ ID NO: 316 - protein, 12 aa, Artificial Sequence
  Synthetic polypeptide
GHGTGSTGSGSS

SEQ ID NO: 317 - protein, 7 aa, Artificial Sequence
  Synthetic polypeptide
MSRPDPA

SEQ ID NO: 318 - protein, 12 aa, Artificial Sequence
  Synthetic polypeptide
SGSETPGTSESA

SEQ ID NO: 319 - protein, 21 aa, Artificial Sequence
  Synthetic polypeptide
SGSETPGTSESATPEGGSGGS

SEQ ID NO: 320 - protein, 4 aa, Artificial Sequence
  Synthetic polypeptide
GGSM

SEQ ID NO: 321 - protein, 1612 aa, Artificial Sequence
  Synthetic polypeptide
MSSETGPVAVDPTLRRRIEPHEFEVFFDPRELRKETCLLYEINWGGRHSIWRHTSQNTNKHVEVNFIEKFTTERYFCPNTRCSITWFLSWSPCGECSRAITEFLSRYPHVTLFIYIARLYHHADPRNRQGLRDLISSGVTIQIMTEQESGYCWRNFVNYSPSNEAHWPRYPHLWVRLYVLELYCIILGLPPCLNILRRKQPQLTFFTIALQSCHYQRLPPHILWATGLKSGSETPGTSESATPESDKKYSIGLAIGTNSVGWAVITDEYKVPSKKFKVLGNTDRHSIKKNLIGALLFDSGETAEATRLKRTARRRYTRRKNRICYLQEIFSNEMAKVDDSFFHRLEESFLVEEDKKHERHPIFGNIVDEVAYHEKYPTIYHLRKKLVDSTDKADLRLIYLALAHMIKFRGHFLIEGDLNPDNSDVDKLFIQLVQTYNQLFEENPINASGVDAKAILSARLSKSRRLENLIAQLPGEKKNGLFGNLIALSLGLTPNFKSNFDLAEDAKLQLSKDTYDDDLDNLLAQIGDQYADLFLAAKNLSDAILLSDILRVNTEITKAPLSASMIKRYDEHHQDLTLLKALVRQQLPEKYKEIFFDQSKNGYAGYIDGGASQEEFYKFIKPILEKMDGTEELLVKLNREDLLRKQRTFDNGSIPHQIHLGELHAILRRQEDFYPFLKDNREKIEKILTFRIPYYVGPLARGNSRFAWMTRKSEETITPWNFEEVVDKGASAQSFIERMTAFDKNLPNEKVLPKHSLLYEYFTVYNELTKVKYVTEGMRKPAFLSGEQKKAIVDLLFKTNRKVTVKQLKEDYFKKIECFDSVEISGVEDRFNASLGTYHDLLKIIKDKDFLDNEENEDILEDIVLTLTLFEDREMIEERLKTYAHLFDDKVMKQLKRRRYTGWGALSRKLINGIRDKQSGKTILDFLKSDGFANRNFMALIHDDSLTFKEDIQKAQVSGQGDSLHEHIANLAGSPAIKKGILQTVKVVDELVKVMGRHKPENIVIEMARENQTTQKGQKNSRERMKRIEEGIKELGSQILKEHPVENTQLQNEKLYLYYLQNGRDMYVDQELDINRLSDYDVDHIVPQSFLKDDSIDNKVLTRSDKNRGKSDNVPSEEVVKKMKNYWRQLLNAKLITQRKFDNLTKAERGGLSELDKAGFIKRQLVETRAITKHVAQILDSRMNTKYDENDKLIREVKVITLKSKLVSDFRKDFQFYKVREINNYHHAHDAYLNAVVGTALIKKYPKLESEFVYGDYKVYDVRKMIAKSEQEIGKATAKYFFYSNIMNFFKTEITLANGEIRKRPLIETNGETGEIVWDKGRDFATVRKVLSMPQVNIVKKTEVQTGGFSKESILPKRNSDKLIARKKDWDPKKYGGFDSPTVAYSVLVVAKVEKGKSKKLKSVKELLGITIMERSSFEKNPIDFLEAKGYKEVKKDLIIKLPKYSLFELENGRKRMLASAGELQKGNELALPSKYVNFLYLASHYEKLKGSPEDNEQKQLFVEQHKHYLDEIIEQISEFSKRVILADANLDKVLSAYNKHRDKPIREQAENIIHLFTLTNLGAPAAFKYFDTTIDRKRYTSTKEVLDATLIHQSITGLYETRIDLSQLGGD

SEQ ID NO: 322 - RNA, 93 nt, Streptococcus pyogenes
guuuaagagcuaugcuggaaagccacggugaaaaaguucaacuauugccugaucggaauaaauuugaacgauacgacagucggugcuuuuuuu

SEQ ID NO: 323 - RNA, 82 nt, Streptococcus pyogenes
guuuaagagcuagaaauagcaaguuuaaauaaggcuaguccguuaucaacuugaaaaaguggcaccgagucggugcuuuuuu

SEQ ID NO: 324 - RNA, 97 nt, Streptococcus thermophilus
guuuuuguacucucaagauucaauaaucuugcagaagcuacaaagauaaggcuucaugccgaaaucaacacccugucauuuuauggcaggguguuuu

SEQ ID NO: 325 - RNA, 97 nt, Streptococcus thermophilus
guuuuagagcuguguuguuuguuaaaacaacacagcgaguuaaaauaaggcuuaguccguacucaacuugaaaagguggcaccgauucgguguuuuu

SEQ ID NO: 326 - RNA, 74 nt, Campylobacter jejuni
aagaaauuuaaaaagggacuaaaauaaagaguuugcgggacucugcgggguuacaauccccuaaaaccgcuuuu

SEQ ID NO: 327 - RNA, 95 nt, Francisella novicida
aucuaaaauuauaaauguaccaaauaauuaaugcucuguaaucauuuaaaaguauuuugaacggaccucuguuugacacgucugaauaacuaaaa

SEQ ID NO: 328 - RNA, 109 nt, Streptococcus thermophilus
uguaagggacgccuuacacaguuacuuaaaucuugcagaagcuacaaagauaaggcuucaugccgaaaucaacacccugucauuuuauggcaggguguuuucguuauuu

SEQ ID NO: 329 - RNA, 110 nt, Mycoplasma mobile
uguauuucgaaauacagauguacaguuaagaauacauaagaaugauacaucacuaaaaaaaggcuuuaugccguaacuacuacuuauuuucaaaauaaguaguuuuuuuu

SEQ ID NO: 330 - RNA, 92 nt, Listeria innocua
auuguuaguauucaaaauaacauagcaaguuaaaauaaggcuuuguccguuaucaacuuuuaauuaaguagcgcuguuucggcgcuuuuuuu

SEQ ID NO: 331 - RNA, 89 nt, Streptococcus pyogenes
guuggaaccauucaaaacagcauagcaaguuaaaauaaggcuaguccguuaucaacuugaaaaaguggcaccgagucggugcuuuuuuu

SEQ ID NO: 332 - RNA, 107 nt, Streptococcus mutans
guuggaaucauucgaaacaacacagcaaguuaaaauaaggcagugauuuuuaauccaguccguacacaacuugaaaaagugcgcaccgauucggugcuuuuuuauuu

SEQ ID NO: 333 - RNA, 96 nt, Streptococcus thermophilus
uugugguuugaaaccauucgaaacaacacagcgaguuaaaauaaggcuuaguccguacucaacuugaaaagguggcaccgauucgguguuuuuuuu

SEQ ID NO: 334 - RNA, 102 nt, Neisseria meningitidis
acauauugucgcacugcgaaaugagaaccguugcuacaauaaggccgucugaaaagaugugccgcaacgcucugccccuuaaagcuucugcuuuaaggggca

SEQ ID NO: 335 - RNA, 110 nt, Pasteurella multocida
gcauauuguugcacugcgaaaugagagacguugcuacaauaaggcuucugaaaagaaugaccguaacgcucugccccuugugauucuuaauugcaaggggcaucguuuuu

SEQ ID NO: 336 - RNA, 82 nt, Artificial Sequence
  Synthetic polynucleotide
guuuuagagcuagaaauagcaaguuaaaauaaaggcuaguccguuaucaacuugaaaaaguggcaccgagucggugcuuuuu

SEQ ID NO: 337 - protein, 120 aa, Artificial Sequence
  Synthetic polypeptide
GGGSGGGSGGGSGGGSGGGSGGGSGGGSGGGSGGGSGGGSGGGSGGGSGGGSGGGSGGGSGGGSGGGSGGGSGGGSGGGSGGGSGGGSGGGSGGGSGGGSGGGSGGGSGGGSGGGSGGGS

SEQ ID NO: 338 - protein, 345 aa, Sulfolobus islandicus
MEVPLYNIFGDNYIIQVATEAENSTIYNNKVEIDDEELRNVLNLAYKIAKNNEDAAAERRGKAKKKKGEEGETTTSNIILPLSGNDKNPWTETLKCYNFPTTVALSEVFKNFSQVKECEEVSAPSFVKPEFYKFGRSPGMVERTRRVKLEVEPHYLIMAAAGWVLTRLGKAKVSEGDYVGVNVFTPTRGILYSLIQNVNGIVPGIKPETAFGLWIARKVVSSVTNPNVSVVSIYTISDAVGQNPTTINGGFSIDLTKLLEKRDLLSERLEAIARNALSISSNMRERYIVLANYIYEYLTGSKRLEDLLYFANRDLIMNLNSDDGKVRDLKLISAYVNGELIRGEG

SEQ ID NO: 339 - protein, 345 aa, Sulfolobus islandicus
MEVPLYNIFGDNYIIQVATEAENSTIYNNKVEIDDEELRNVLNLAYKIAKNNEDAAAERRGKAKKKKGEEGETTTSNIILPLSGNDKNPWTETLKCYNFPTTVALSEVFKNFSQVKECEEVSAPSFVKPEFYEFGRSPGMVERTRRVKLEVEPHYLIIAAAGWVLTRLGKAKVSEGDYVGVNVFTPTRGILYSLIQNVNGIVPGIKPETAFGLWIARKVVSSVTNPNVSVVRIYTISDAVGQNPTTINGGFSIDLTKLLEKRYLLSERLEAIARNALSISSNMRERYIVLANYIYEYLTGSKRLEDLLYFANRDLIMNLNSDDGKVRDLKLISAYVNGELIRGEG

SEQ ID NO: 340 - protein, 9 aa, Artificial Sequence
  Synthetic polypeptide
YLSGANLNL

SEQ ID NO: 341 - protein, 9 aa, Artificial Sequence
  Synthetic polypeptide
IMIGVLVGV

SEQ ID NO: 342 - protein, 9 aa, Artificial Sequence
  Synthetic polypeptide
GVLVGVALI

SEQ ID NO: 343 - protein, 9 aa, Artificial Sequence
  Synthetic polypeptide
LLTFWNPPT

SEQ ID NO: 344 - protein, 9 aa, Artificial Sequence
  Synthetic polypeptide
HLFGYSWYK

SEQ ID NO: 345 - protein, 10 aa, Artificial Sequence
  Synthetic polypeptide
QYSWFVNGTF

SEQ ID NO: 346 - protein, 9 aa, Artificial Sequence
  Synthetic polypeptide
TYACFVSNL

SEQ ID NO: 347 - protein, 15 aa, Artificial Sequence
  Synthetic polypeptide
AYVCGIQNSVSANRS

SEQ ID NO: 348 - protein, 25 aa, Artificial Sequence
  Synthetic polypeptide
DTGFYTLHVIKSDLVNEEATGQFRV

SEQ ID NO: 349 - protein, 15 aa, Artificial Sequence
  Synthetic polypeptide
YSWRINGIPQQHTQV

SEQ ID NO: 350 - protein, 13 aa, Artificial Sequence
  Synthetic polypeptide
TYYRPGVNLSLSC

SEQ ID NO: 351 - protein, 13 aa, Artificial Sequence
  Synthetic polypeptide
EIIYPNASLLIQN

SEQ ID NO: 352 - protein, 15 aa, Artificial Sequence
  Synthetic polypeptide
YACFVSNLATGRNNS

SEQ ID NO: 353 - protein, 13 aa, Artificial Sequence
  Synthetic polypeptide
LWWVNNQSLPVSP

SEQ ID NO: 354 - protein, 13 aa, Artificial Sequence
  Synthetic polypeptide
LWWVNNQSLPVSP

SEQ ID NO: 355 - protein, 13 aa, Artificial Sequence
  Synthetic polypeptide
LWWVNNQSLPVSP

SEQ ID NO: 356 - protein, 13 aa, Artificial Sequence
  Synthetic polypeptide
EIIYPNASLLIQN

SEQ ID NO: 357 - protein, 13 aa, Artificial Sequence
  Synthetic polypeptide
NSIVKSITVSASG

SEQ ID NO: 358 - protein, 9 aa, Artificial Sequence
  Synthetic polypeptide
KTWGQYWQV

SEQ ID NO: 359 - protein, 10 aa, Artificial Sequence
  Synthetic polypeptide
AMLGTHTMEV

SEQ ID NO: 360 - protein, 9 aa, Artificial Sequence
  Synthetic polypeptide
ITDQVPFSV

SEQ ID NO: 361 - protein, 9 aa, Artificial Sequence
  Synthetic polypeptide
YLEPGPVTA

SEQ ID NO: 362 - protein, 10 aa, Artificial Sequence
  Synthetic polypeptide
LLDGTATLRL

SEQ ID NO: 363 - protein, 10 aa, Artificial Sequence
  Synthetic polypeptide
VLYRYGSFSV

SEQ ID NO: 364 - protein, 10 aa, Artificial Sequence
  Synthetic polypeptide
SLADTNSLAV

SEQ ID NO: 365 - protein, 9 aa, Artificial Sequence
  Synthetic polypeptide
RLMKQDFSV

SEQ ID NO: 366 - protein, 9 aa, Artificial Sequence
  Synthetic polypeptide
RLPRIFCSC

SEQ ID NO: 367 - protein, 9 aa, Artificial Sequence
  Synthetic polypeptide
LIYRRRLMK

SEQ ID NO: 368 - protein, 9 aa, Artificial Sequence
  Synthetic polypeptide
ALLAVGATK

SEQ ID NO: 369 - protein, 10 aa, Artificial Sequence
  Synthetic polypeptide
IALNFPGSQK

SEQ ID NO: 370 - protein, 9 aa, Artificial Sequence
  Synthetic polypeptide
RSYVPLAHR

SEQ ID NO: 371 - protein, 9 aa, Artificial Sequence
  Synthetic polypeptide
ALNFPGSQK

SEQ ID NO: 372 - protein, 9 aa, Artificial Sequence
  Synthetic polypeptide
ALNFPGSQK

SEQ ID NO: 373 - protein, 9 aa, Artificial Sequence
  Synthetic polypeptide
VYFFLPDHL

SEQ ID NO: 374 - protein, 9 aa, Artificial Sequence
  Synthetic polypeptide
RTKQLYPEW

SEQ ID NO: 375 - protein, 10 aa, Artificial Sequence
  Synthetic polypeptide
HTMEVTVYHR

SEQ ID NO: 376 - protein, 9 aa, Artificial Sequence
  Synthetic polypeptide
SSPGCQPPA

SEQ ID NO: 377 - protein, 10 aa, Artificial Sequence
  Synthetic polypeptide
VPLDCVLYRY

SEQ ID NO: 378 - protein, 9 aa, Artificial Sequence
  Synthetic polypeptide
LPHSSSHWL

SEQ ID NO: 379 - protein, 8 aa, Artificial Sequence
  Synthetic polypeptide
SNDGPTLI

SEQ ID NO: 380 - protein, 15 aa, Artificial Sequence
  Synthetic polypeptide
GRAMLGTHTMEVTVY

SEQ ID NO: 381 - protein, 16 aa, Artificial Sequence
  Synthetic polypeptide
WNRQLYPEWTEAQRLD

SEQ ID NO: 382 - protein, 18 aa, Artificial Sequence
  Synthetic polypeptide
TTEWVETTARELPIPEPE

SEQ ID NO: 383 - protein, 17 aa, Artificial Sequence
  Synthetic polypeptide
TGRAMLGTHTMEVTVYH

SEQ ID NO: 384 - protein, 15 aa, Artificial Sequence
  Synthetic polypeptide
GRAMLGTHTMEVTVY

SEQ ID NO: 385 - protein, 9 aa, Artificial Sequence
  Synthetic polypeptide
PLLENVISK

SEQ ID NO: 386 - protein, 10 aa, Artificial Sequence
  Synthetic polypeptide
EAAGIGILTV

SEQ ID NO: 387 - protein, 9 aa, Artificial Sequence
  Synthetic polypeptide
ILTVILGVL

SEQ ID NO: 388 - protein, 10 aa, Artificial Sequence
  Synthetic polypeptide
EAAGIGILTV

SEQ ID NO: 389 - protein, 11 aa, Artificial Sequence
  Synthetic polypeptide
AEEAAGIGILT

SEQ ID NO: 390 - protein, 11 aa, Artificial Sequence
  Synthetic polypeptide
RNGYRALMDKS

SEQ ID NO: 391 - protein, 30 aa, Artificial Sequence
  Synthetic polypeptide
YTTAEEAAGIGILTVILGVLLLIGCWYCRR

SEQ ID NO: 392 - protein, 12 aa, Artificial Sequence
  Synthetic polypeptide
EEAAGIGILTVI

SEQ ID NO: 393 - protein, 14 aa, Artificial Sequence
  Synthetic polypeptide
AAGIGILTVILGVL

SEQ ID NO: 394 - protein, 14 aa, Artificial Sequence
  Synthetic polypeptide
APPAYEKLPSAEQF

SEQ ID NO: 395 - protein, 12 aa, Artificial Sequence
  Synthetic polypeptide
EEAAGIGILTVI

SEQ ID NO: 396 - protein, 23 aa, Artificial Sequence
  Synthetic polypeptide
RNGYRALMDKSLHVGTQCALTRR

SEQ ID NO: 397 - protein, 20 aa, Artificial Sequence
  Synthetic polypeptide
MPREDAHFIYGYPKKGHGHS

SEQ ID NO: 398 - protein, 20 aa, Artificial Sequence
  Synthetic polypeptide
KNCEPVVPNAPPAYEKLSAE

SEQ ID NO: 399 - protein, 9 aa, Artificial Sequence
  Synthetic polypeptide
SLSKILDTV

SEQ ID NO: 400 - protein, 10 aa, Artificial Sequence
  Synthetic polypeptide
IVWELMTFGA

SEQ ID NO: 401 - protein, 9 aa, Artificial Sequence
  Synthetic polypeptide
LYSACFWWL

SEQ ID NO: 402 - protein, 9 aa, Artificial Sequence
  Synthetic polypeptide
FLFLLFFWL

SEQ ID NO: 403 - protein, 9 aa, Artificial Sequence
  Synthetic polypeptide
TLMSAMTNL

SEQ ID NO: 404 - protein, 9 aa, Artificial Sequence
  Synthetic polypeptide
ALDVYNGLL

SEQ ID NO: 405 - protein, 10 aa, Artificial Sequence
  Synthetic polypeptide
FLTPKKLQCV

SEQ ID NO: 406 - protein, 10 aa, Artificial Sequence
  Synthetic polypeptide
VISNDVCAQV

SEQ ID NO: 407 - protein, 9 aa, Artificial Sequence
  Synthetic polypeptide
VLHWDPETV

SEQ ID NO: 408 - protein, 9 aa, Artificial Sequence
  Synthetic polypeptide
MSLQRQFLR

SEQ ID NO: 409 - protein, 21 aa, Artificial Sequence
  Synthetic polypeptide
ISPNSVFSQWRVVCDSLEDYD

SEQ ID NO: 410 - protein, 10 aa, Artificial Sequence
  Synthetic polypeptide
SLPYWNFATG

SEQ ID NO: 411 - protein, 15 aa, Artificial Sequence
  Synthetic polypeptide
SQWRVVCDSLEDYDT

SEQ ID NO: 412 - protein, 9 aa, Artificial Sequence
  Synthetic polypeptide
SVYDFFVWL

SEQ ID NO: 413 - protein, 9 aa, Artificial Sequence
  Synthetic polypeptide
TLDSQVMSL

SEQ ID NO: 414 - protein, 9 aa, Artificial Sequence
  Synthetic polypeptide
LLGPGRPYR

SEQ ID NO: 415 - protein, 9 aa, Artificial Sequence
  Synthetic polypeptide
LLGPGRPYR

SEQ ID NO: 416 - protein, 9 aa, Artificial Sequence
  Synthetic polypeptide
ANDPIFVVL

SEQ ID NO: 417 - protein, 15 aa, Artificial Sequence
  Synthetic polypeptide
QCTEVRADTRPWSGP

SEQ ID NO: 418 - protein, 10 aa, Artificial Sequence
  Synthetic polypeptide
ALPYWNFATG

SEQ ID NO: 419 - protein, 9 aa, Artificial Sequence
  Synthetic polypeptide
KCDICTDEY

SEQ ID NO: 420 - protein, 11 aa, Artificial Sequence
  Synthetic polypeptide
SSDYVIPIGTY

SEQ ID NO: 421 - protein, 9 aa, Artificial Sequence
  Synthetic polypeptide
MLLAVLYCL

SEQ ID NO: 422 - protein, 10 aa, Artificial Sequence
  Synthetic polypeptide
CLLWSFQTSA

SEQ ID NO: 423 - protein, 9 aa, Artificial Sequence
  Synthetic polypeptide
YMDGTMSQV

SEQ ID NO: 424 - protein, 9 aa, Artificial Sequence
  Synthetic polypeptide
AFLPWHRLF

SEQ ID NO: 425 - protein, 11 aa, Artificial Sequence
  Synthetic polypeptide
IYMDGTADFSF

SEQ ID NO: 426 - protein, 9 aa, Artificial Sequence
  Synthetic polypeptide
QCSGNFMGF

SEQ ID NO: 427 - protein, 12 aa, Artificial Sequence
  Synthetic polypeptide
TPRLPSSADVEF

SEQ ID NO: 428 - protein, 9 aa, Artificial Sequence
  Synthetic polypeptide
LPSSADVEF

SEQ ID NO: 429 - protein, 10 aa, Artificial Sequence
  Synthetic polypeptide
LHHAFVDSIF

SEQ ID NO: 430 - protein, 10 aa, Artificial Sequence
  Synthetic polypeptide
SEIWRDIDFD

SEQ ID NO: 431 - protein, 15 aa, Artificial Sequence
  Synthetic polypeptide
QNILLSNAPLGPQFP

SEQ ID NO: 432 - protein, 13 aa, Artificial Sequence
  Synthetic polypeptide
SYLQDSDPDSFQD

SEQ ID NO: 433 - protein, 21 aa, Artificial Sequence [sequence omitted]

SEQ ID NO: 434 - protein, 11 aa, Artificial Sequence
  Synthetic polypeptide
TSEKRPFMCAY

SEQ ID NO: 435 - protein, 9 aa, Artificial Sequence
  Synthetic polypeptide
CMTWNQMNL

SEQ ID NO: 436 - protein, 11 aa, Artificial Sequence
  Synthetic polypeptide
LSHLQMHSRKH

SEQ ID NO: 437 - protein, 16 aa, Artificial Sequence
  Synthetic polypeptide
KRYFKLSHLQMHSRKH

SEQ ID NO: 438 - protein, 16 aa, Artificial Sequence
  Synthetic polypeptide
KRYFKLSHLQMHSRKH

SEQ ID NO: 439 - protein, 9 aa, Artificial Sequence
  Synthetic polypeptide
AIISGDSPV

SEQ ID NO: 440 - protein, 9 aa, Artificial Sequence
  Synthetic polypeptide
AARAVFLAL

SEQ ID NO: 441 - protein, 15 aa, Artificial Sequence
  Synthetic polypeptide
KPLFRRMSSLELVIA

SEQ ID NO: 442 - protein, 9 aa, Artificial Sequence
  Synthetic polypeptide
FLDRFLSCM

SEQ ID NO: 443 - protein, 11 aa, Artificial Sequence
  Synthetic polypeptide
SLIAAAAFCLA

SEQ ID NO: 444 - protein, 8 aa, Artificial Sequence
  Synthetic polypeptide
YRPRPRRY

SEQ ID NO: 445 - protein, 9 aa, Artificial Sequence
  Synthetic polypeptide
YYWPRPRRY

SEQ ID NO: 446 - protein, 10 aa, Artificial Sequence
  Synthetic polypeptide
VLPDVFIRCV

SEQ ID NO: 447 - protein, 9 aa, Artificial Sequence
  Synthetic polypeptide
MLAVISCAV

SEQ ID NO: 448 - protein, 9 aa, Artificial Sequence
  Synthetic polypeptide
RQKRILVNL

SEQ ID NO: 449 - protein, 9 aa, Artificial Sequence
  Synthetic polypeptide
NYNNFYRFL

SEQ ID NO: 450 - protein, 10 aa, Artificial Sequence
  Synthetic polypeptide
EYSKECLKEF

SEQ ID NO: 451 - protein, 9 aa, Artificial Sequence
  Synthetic polypeptide
EYLSLSDKI

SEQ ID NO: 452 - protein, 11 aa, Artificial Sequence
  Synthetic polypeptide
MLMAQEALAFL

SEQ ID NO: 453 - protein, 9 aa, Artificial Sequence
  Synthetic polypeptide
SLLMWITQC

SEQ ID NO: 454 - protein, 10 aa, Artificial Sequence
  Synthetic polypeptide
LAAQERRVPR

SEQ ID NO: 455 - protein, 9 aa, Artificial Sequence
  Synthetic polypeptide
ELVRRILSR

SEQ ID NO: 456 - protein, 9 aa, Artificial Sequence
  Synthetic polypeptide
APRGVRMAV

SEQ ID NO: 457 - protein, 14 aa, Artificial Sequence
  Synthetic polypeptide
SLLMWITQCFLPVF

SEQ ID NO: 458 - protein, 20 aa, Artificial Sequence
  Synthetic polypeptide
QGAMLAAQERRVPRAAEVPR

SEQ ID NO: 459 - protein, 18 aa, Artificial Sequence
  Synthetic polypeptide
AADHRQLQLSISSCLQQL

SEQ ID NO: 460 - protein, 22 aa, Artificial Sequence
  Synthetic polypeptide
CLSRRPWKRSWSAGSCPGMPHL

SEQ ID NO: 461 - protein, 22 aa, Artificial Sequence
  Synthetic polypeptide
CLSRRPWKRSWSAGSCPGMPHL

SEQ ID NO: 462 - protein, 13 aa, Artificial Sequence
  Synthetic polypeptide
ILSRDAAPLPRPG

SEQ ID NO: 463 - protein, 14 aa, Artificial Sequence
  Synthetic polypeptide
AGATGGRGPRGAGA

SEQ ID NO: 464 - protein, 10 aa, Artificial Sequence
  Synthetic polypeptide
RYCNLEGPPI

SEQ ID NO: 465 - protein, 24 aa, Artificial Sequence
  Synthetic polypeptide
KWTEPYCVIAAVKIFPRFFMVAKQ

SEQ ID NO: 466 - protein, 20 aa, Artificial Sequence
  Synthetic polypeptide
KCCKIRYCNLEGPPINSSVF

SEQ ID NO: 467 - protein, 9 aa, Artificial Sequence
  Synthetic polypeptide
EADPTGHSY

SEQ ID NO: 468 - protein, 9 aa, Artificial Sequence
  Synthetic polypeptide
KVLEYVIKV

SEQ ID NO: 469 - protein, 9 aa, Artificial Sequence
  Synthetic polypeptide
SLFRAVITK

SEQ ID NO: 470 - protein, 10 aa, Artificial Sequence
  Synthetic polypeptide
EVYDGREHSA

SEQ ID NO: 471 - protein, 9 aa, Artificial Sequence
  Synthetic polypeptide
RVRFFFPSL

SEQ ID NO: 472 - protein, 9 aa, Artificial Sequence
  Synthetic polypeptide
EADPTGHSY

SEQ ID NO: 473 - protein, 10 aa, Artificial Sequence
  Synthetic polypeptide
REPVTKAEML

SEQ ID NO: 474 - protein, 10 aa, Artificial Sequence
  Synthetic polypeptide
KEADPTGHSY

SEQ ID NO: 475 - protein, 9 aa, Artificial Sequence
  Synthetic polypeptide
DPARYEFLW

SEQ ID NO: 476 - protein, 11 aa, Artificial Sequence
  Synthetic polypeptide
ITKKVADLVGF

SEQ ID NO: 477 - protein, 9 aa, Artificial Sequence
  Synthetic polypeptide
SAFPTTINF

SEQ ID NO: 478 - protein, 9 aa, Artificial Sequence
  Synthetic polypeptide
SAYGEPRKL

SEQ ID NO: 479 - protein, 9 aa, Artificial Sequence
  Synthetic polypeptide
RVRFFFPSL

SEQ ID NO: 480 - protein, 9 aa, Artificial Sequence
  Synthetic polypeptide
SAYGEPRKL

SEQ ID NO: 481 - protein, 15 aa, Artificial Sequence
  Synthetic polypeptide
TSCILESLFRAVITK

SEQ ID NO: 482 - protein, 15 aa, Artificial Sequence
  Synthetic polypeptide
PRALAETSYVKVLEY

SEQ ID NO: 483 - protein, 16 aa, Artificial Sequence
  Synthetic polypeptide
FLLLKYRAREPVTKAE

SEQ ID NO: 484 - protein, 12 aa, Artificial Sequence
  Synthetic polypeptide
EYVIKVSARVRF

SEQ ID NO: 485 - protein, 10 aa, Artificial Sequence
  Synthetic polypeptide
YLQLVFGIEV

SEQ ID NO: 486 - protein, 9 aa, Artificial Sequence
  Synthetic polypeptide
EYLQLVFGI

SEQ ID NO: 487 - protein, 10 aa, Artificial Sequence
  Synthetic polypeptide
REPVTKAEML

SEQ ID NO: 488 - protein, 9 aa, Artificial Sequence
  Synthetic polypeptide
EGDCAPEEK

SEQ ID NO: 489 - protein, 14 aa, Artificial Sequence
  Synthetic polypeptide
LLKYRAREPVTKAE

SEQ ID NO: 490 - protein, 9 aa, Artificial Sequence
  Synthetic polypeptide
EVDPIGHLY

SEQ ID NO: 491 - protein, 10 aa, Artificial Sequence
  Synthetic polypeptide
FLWGPRALVD

SEQ ID NO: 492 - protein, 9 aa, Artificial Sequence
  Synthetic polypeptide
KVAELVHFL

SEQ ID NO: 493 - protein, 9 aa, Artificial Sequence
  Synthetic polypeptide
TFPDLESEF

SEQ ID NO: 494 - protein, 9 aa, Artificial Sequence
  Synthetic polypeptide
VAELVHFLL

SEQ ID NO: 495 - protein, 10 aa, Artificial Sequence
  Synthetic polypeptide
MEVDPIGHLY

SEQ ID NO: 496 - protein, 9 aa, Artificial Sequence
  Synthetic polypeptide
EVDPIGHLY

SEQ ID NO: 497 - protein, 10 aa, Artificial Sequence
  Synthetic polypeptide
REPVTKAEML

SEQ ID NO: 498 - protein, 9 aa, Artificial Sequence
  Synthetic polypeptide
AELVHFLLL

SEQ ID NO: 499 - protein, 10 aa, Artificial Sequence
  Synthetic polypeptide
MEVDPIGHLY

SEQ ID NO: 500 - protein, 9 aa, Artificial Sequence
  Synthetic polypeptide
WQYFFPVIF

SEQ ID NO: 501 - protein, 9 aa, Artificial Sequence
  Synthetic polypeptide
EGDCAPEEK

SEQ ID NO: 502 - protein, 16 aa, Artificial Sequence
  Synthetic polypeptide
KKLLTQHFVQENYLEY

SEQ ID NO: 503 - protein, 15 aa, Artificial Sequence
  Synthetic polypeptide
RKVAELVHFLLLKYR

SEQ ID NO: 504 - protein, 16 aa, Artificial Sequence
  Synthetic polypeptide
KKLLTQHFVQENYLEY

SEQ ID NO: 505 - protein, 16 aa, Artificial Sequence
  Synthetic polypeptide
ACYEFLWGPRALVETS

SEQ ID NO: 506 - protein, 15 aa, Artificial Sequence
  Synthetic polypeptide
RKVAELVHFLLLKYR

SEQ ID NO: 507 - protein, 12 aa, Artificial Sequence
  Synthetic polypeptide
VIFSKASSSLQL

SEQ ID NO: 508 - protein, 12 aa, Artificial Sequence
  Synthetic polypeptide
VIFSKASSSLQL

SEQ ID NO: 509 - protein, 15 aa, Artificial Sequence
  Synthetic polypeptide
VFGIELMEVDPIGHL

SEQ ID NO: 510 - protein, 15 aa, Artificial Sequence
  Synthetic polypeptide
GDNQIMPKAGLLIIV

SEQ ID NO: 511 - protein, 15 aa, Artificial Sequence
  Synthetic polypeptide
TSYVKVLHHMVKISG

SEQ ID NO: 512 - protein, 16 aa, Artificial Sequence
  Synthetic polypeptide
RKVAELVHFLLLKYRA

SEQ ID NO: 513 - protein, 16 aa, Artificial Sequence
  Synthetic polypeptide
FLLLKYRAREPVTKAE

SEQ ID NO: 514 - protein, 9 aa, Artificial Sequence
  Synthetic polypeptide
EVDPASNTY

SEQ ID NO: 515 - protein, 10 aa, Artificial Sequence
  Synthetic polypeptide
GVYDGREHTV

SEQ ID NO: 516 - protein, 9 aa, Artificial Sequence
  Synthetic polypeptide
NYKRCFPVI

SEQ ID NO: 517 - protein, 8 aa, Artificial Sequence
  Synthetic polypeptide
SESLKMIF

SEQ ID NO: 518 - protein, 9 aa, Artificial Sequence
  Synthetic polypeptide
MVKISGGPR

SEQ ID NO: 519 - protein, 9 aa, Artificial Sequence
  Synthetic polypeptide
EVDPIGHVY

SEQ ID NO: 520 - protein, 10 aa, Artificial Sequence
  Synthetic polypeptide
REPVTKAEML

SEQ ID NO: 521 - protein, 9 aa, Artificial Sequence
  Synthetic polypeptide
EGDCAPEEK

SEQ ID NO: 522 - protein, 9 aa, Artificial Sequence
  Synthetic polypeptide
ISGGPRISY

SEQ ID NO: 523 - protein, 14 aa, Artificial Sequence
  Synthetic polypeptide
LLKYRAREPVTKAE

SEQ ID NO: 524 - protein, 9 aa, Artificial Sequence
  Synthetic polypeptide
ALSVMGVYV

SEQ ID NO: 525 - protein, 10 aa, Artificial Sequence
  Synthetic polypeptide
GLYDGMEHLI

SEQ ID NO: 526 - protein, 9 aa, Artificial Sequence
  Synthetic polypeptide
DPARYEFLW

SEQ ID NO: 527 - protein, 9 aa, Artificial Sequence
  Synthetic polypeptide
FLWGPRALV

SEQ ID NO: 528 - protein, 9 aa, Artificial Sequence
  Synthetic polypeptide
VRIGHLYIL

SEQ ID NO: 529 - protein, 9 aa, Artificial Sequence
  Synthetic polypeptide
EGDCAPEEK

SEQ ID NO: 530 - protein, 15 aa, Artificial Sequence
  Synthetic polypeptide
REPFTKAEMLGSVIR

SEQ ID NO: 531 - protein, 14 aa, Artificial Sequence
  Synthetic polypeptide
AELVHFLLLKYRAR

SEQ ID NO: 532 - protein, 10 aa, Artificial Sequence
  Synthetic polypeptide
ILFGISLREV

SEQ ID NO: 533 - protein, 9 aa, Artificial Sequence
  Synthetic polypeptide
KVVEFLAML

SEQ ID NO: 534 - protein, 13 aa, Artificial Sequence
  Synthetic polypeptide
SSALLSIFQSSPE

SEQ ID NO: 535 - protein, 9 aa, Artificial Sequence
  Synthetic polypeptide
SFSYTLLSL

SEQ ID NO: 536 - protein, 9 aa, Artificial Sequence
  Synthetic polypeptide
VSSFFSYTL

SEQ ID NO: 537 - protein, 10 aa, Artificial Sequence
  Synthetic polypeptide
LLFGLALIEV

SEQ ID NO: 538 - protein, 9 aa, Artificial Sequence
  Synthetic polypeptide
ALKDVEERV

SEQ ID NO: 539 - protein, 9 aa, Artificial Sequence
  Synthetic polypeptide
SESIKKKVL

SEQ ID NO: 540 - protein, 9 aa, Artificial Sequence
  Synthetic polypeptide
ASSTLYLVF

SEQ ID NO: 541 - protein, 15 aa, Artificial Sequence
  Synthetic polypeptide
SSTLYLVFSPSSFST

SEQ ID NO: 542 - protein, 20 aa, Artificial Sequence
  Synthetic polypeptide
PDTRPAPGSTAPPAHGVTSA

SEQ ID NO: 543 - protein, 9 aa, Artificial Sequence
  Synthetic polypeptide
QGQHFLQKV

SEQ ID NO: 544 - protein, 9 aa, Artificial Sequence
  Synthetic polypeptide
SLLMWITQC

SEQ ID NO: 545 - protein, 11 aa, Artificial Sequence
  Synthetic polypeptide
MLMAQEALAFL

SEQ ID NO: 546 - protein, 11 aa, Artificial Sequence
  Synthetic polypeptide
YLAMPFATPME

SEQ ID NO: 547 - protein, 10 aa, Artificial Sequence
  Synthetic polypeptide
ASGPGGGAPR

SEQ ID NO: 548 - protein, 10 aa, Artificial Sequence
  Synthetic polypeptide
LAAQERRVPR

SEQ ID NO: 549 - protein, 10 aa, Artificial Sequence
  Synthetic polypeptide
TVSGNILTIR

SEQ ID NO: 550 - protein, 13 aa, Artificial Sequence
  Synthetic polypeptide
APRGPHGGAASGL

SEQ ID NO: 551 - protein, 11 aa, Artificial Sequence
  Synthetic polypeptide
MPFATPMEAEL

SEQ ID NO: 552 - protein, 12 aa, Artificial Sequence
  Synthetic polypeptide
KEFTVSGNILTI

SEQ ID NO: 553 - protein, 9 aa, Artificial Sequence
  Synthetic polypeptide
MPFATPMEA

SEQ ID NO: 554 - protein, 9 aa, Artificial Sequence
  Synthetic polypeptide
FATPMEAEL

SEQ ID NO: 555 - protein, 11 aa, Artificial Sequence
  Synthetic polypeptide
FATPMEAELAR

SEQ ID NO: 556 - protein, 9 aa, Artificial Sequence
  Synthetic polypeptide
LAMPFATPM

SEQ ID NO: 557 - protein, 9 aa, Artificial Sequence
  Synthetic polypeptide
ARGPESRLL

SEQ ID NO: 558 - protein, 14 aa, Artificial Sequence
  Synthetic polypeptide
SLLMWITQCFLPVF

SEQ ID NO: 559 - protein, 25 aa, Artificial Sequence
  Synthetic polypeptide
LLEFYLAMPFATPMEAELARRSLAQ

SEQ ID NO: 560 - protein, 25 aa, Artificial Sequence
  Synthetic polypeptide
LLEFYLAMPFATPMEAELARRSLAQ

SEQ ID NO: 561 - protein, 12 aa, Artificial Sequence
  Synthetic polypeptide
EFYLAMPFATPM

SEQ ID NO: 562 - protein, 25 aa, Artificial Sequence
  Synthetic polypeptide
PGVLLKEFTVSGNILTIRLTAADHR

SEQ ID NO: 563 - protein, 12 aa, Artificial Sequence
  Synthetic polypeptide
RLLEFYLAMPFA

SEQ ID NO: 564 - protein, 20 aa, Artificial Sequence
  Synthetic polypeptide
QGAMLAAQERRVPRAAEVPR

SEQ ID NO: 565 - protein, 13 aa, Artificial Sequence
  Synthetic polypeptide
PFATPMEAELARR

SEQ ID NO: 566 - protein, 20 aa, Artificial Sequence
  Synthetic polypeptide
PGVLLKEFTVSGNILTIRLT

SEQ ID NO: 567 - protein, 10 aa, Artificial Sequence
  Synthetic polypeptide
VLLKEFTVSG

SEQ ID NO: 568 - protein, 18 aa, Artificial Sequence
  Synthetic polypeptide
AADHRQLQLSISSCLQQL

SEQ ID NO: 569 - protein, 25 aa, Artificial Sequence
  Synthetic polypeptide
LLEFYLAMPFATPMEAELARRSLAQ

SEQ ID NO: 570 - protein, 15 aa, Artificial Sequence
  Synthetic polypeptide
LKEFTVSGNILTIRL

SEQ ID NO: 571 - protein, 25 aa, Artificial Sequence
  Synthetic polypeptide
PGVLLKEFTVSGNILTIRLTAADHR

SEQ ID NO: 572 - protein, 25 aa, Artificial Sequence
  Synthetic polypeptide
LLEFYLAMPFATPMEAELARRSLAQ

SEQ ID NO: 573 - protein, 11 aa, Artificial Sequence
  Synthetic polypeptide
KEFTVSGNILT

SEQ ID NO: 574 - protein, 14 aa, Artificial Sequence
  Synthetic polypeptide
LLEFYLAMPFATPM

SEQ ID NO: 575 - protein, 14 aa, Artificial Sequence
  Synthetic polypeptide
AGATGGRGPRGAGA

SEQ ID NO: 576 - protein, 9 aa, Artificial Sequence
  Synthetic polypeptide
LYATVIHDI

SEQ ID NO: 577 - protein, 9 aa, Artificial Sequence
  Synthetic polypeptide
ILDSSEEDK

SEQ ID NO: 578 - protein, 9 aa, Artificial Sequence
  Synthetic polypeptide
KASEKIFYV

SEQ ID NO: 579 - protein, 16 aa, Artificial Sequence
  Synthetic polypeptide
EKIQKAFDDIAKYFSK

SEQ ID NO: 580 - protein, 11 aa, Artificial Sequence
  Synthetic polypeptide
FGRLQGISPKI

SEQ ID NO: 581 - protein, 18 aa, Artificial Sequence
  Synthetic polypeptide
WEKMKASEKIFYVYMKRK

SEQ ID NO: 582 - protein, 15 aa, Artificial Sequence
  Synthetic polypeptide
KIFYVYMKRKYEAMT

SEQ ID NO: 583 - protein, 14 aa, Artificial Sequence
  Synthetic polypeptide
KIFYVYMKRKYEAM

SEQ ID NO: 584 - protein, 20 aa, Artificial Sequence
  Synthetic polypeptide
INKTSGPKRGKHAWTHRLRE

SEQ ID NO: 585 - protein, 20 aa, Artificial Sequence
  Synthetic polypeptide
YFSKKEWEKMKSSEKIVYVY

SEQ ID NO: 586 - protein, 20 aa, Artificial Sequence
  Synthetic polypeptide
MKLNYEVMTKLGFKVTLPPF

SEQ ID NO: 587 - protein, 20 aa, Artificial Sequence
  Synthetic polypeptide
KHAWTHRLRERKQLVVYEEI

SEQ ID NO: 588 - protein, 20 aa, Artificial Sequence
  Synthetic polypeptide
LGFKVTLPPFMRSKRAADFH

SEQ ID NO: 589 - protein, 20 aa, Artificial Sequence
  Synthetic polypeptide
KSSEKIVYVYMKLNYEVMTK

SEQ ID NO: 590 - protein, 20 aa, Artificial Sequence
  Synthetic polypeptide
KHAWTHRLRERKQLVVYEEI

SEQ ID NO: 591 - protein, 10 aa, Artificial Sequence
  Synthetic polypeptide
ELTLGEFLKL

SEQ ID NO: 592 - protein, 9 aa, Artificial Sequence
  Synthetic polypeptide
AYACNTSTL

SEQ ID NO: 593 - protein, 9 aa, Artificial Sequence
  Synthetic polypeptide
SLGWLFLLL

SEQ ID NO: 594 - protein, 9 aa, Artificial Sequence
  Synthetic polypeptide
LSRLSNRLL

SEQ ID NO: 595 - protein, 9 aa, Artificial Sequence
  Synthetic polypeptide
LSRLSNRLL

SEQ ID NO: 596 - protein, 15 aa, Artificial Sequence
  Synthetic polypeptide
CEFHACWPAFTVLGE

SEQ ID NO: 597 - protein, 15 aa, Artificial Sequence
  Synthetic polypeptide
CEFHACWPAFTVLGE

SEQ ID NO: 598 - protein, 15 aa, Artificial Sequence
  Synthetic polypeptide
CEFHACWPAFTVLGE

SEQ ID NO: 599 - protein, 10 aa, Artificial Sequence
  Synthetic polypeptide
EVISCKLIKR

SEQ ID NO: 600 - protein, 9 aa, Artificial Sequence
  Synthetic polypeptide
RQKKIRIQL

SEQ ID NO: 601 - protein, 16 aa, Artificial Sequence
  Synthetic polypeptide
HLGSRQKKIRIQLRSQ

SEQ ID NO: 602 - protein, 17 aa, Artificial Sequence
  Synthetic polypeptide
CATWKVICKSCISQTPG

SEQ ID NO: 603 - protein, 9 aa, Artificial Sequence
  Synthetic polypeptide
SSKALQRPV

SEQ ID NO: 604 - protein, 9 aa, Artificial Sequence
  Synthetic polypeptide
GFKQSSKAL

SEQ ID NO: 605 - protein, 17 aa, Artificial Sequence
  Synthetic polypeptide
ATGFKQSSKALQRPVAS

SEQ ID NO: 606 - protein, 17 aa, Artificial Sequence
  Synthetic polypeptide
ATGFKQSSKALQRPVAS

SEQ ID NO: 607 - protein, 9 aa, Artificial Sequence
  Synthetic polypeptide
SVASTITGV

SEQ ID NO: 608 - protein, 10 aa, Artificial Sequence
  Synthetic polypeptide
RSDSGQQARY

SEQ ID NO: 609 - protein, 9 aa, Artificial Sequence
  Synthetic polypeptide
LLYKLADLI

SEQ ID NO: 610 - protein, 10 aa, Artificial Sequence
  Synthetic polypeptide
YLNDHLEPWI

SEQ ID NO: 611 - protein, 9 aa, Artificial Sequence
  Synthetic polypeptide
CQWGRLWQL

SEQ ID NO: 612 - protein, 10 aa, Artificial Sequence
  Synthetic polypeptide
VLLQAGSLHA

SEQ ID NO: 613 - protein, 9 aa, Artificial Sequence
  Synthetic polypeptide
KFLDALISL

SEQ ID NO: 614 - protein, 9 aa, Artificial Sequence
  Synthetic polypeptide
LLNAFTVTV

SEQ ID NO: 615 - protein, 9 aa, Artificial Sequence
  Synthetic polypeptide
KVHPVIWSL

SEQ ID NO: 616 - protein, 10 aa, Artificial Sequence
  Synthetic polypeptide
LMLQNALTTM

SEQ ID NO: 617 - protein, 9 aa, Artificial Sequence
  Synthetic polypeptide
LLGATCMFV

SEQ ID NO: 618 - protein, 15 aa, Artificial Sequence
  Synthetic polypeptide
NPPSMVAAGSVVAAV

SEQ ID NO: 619 - protein, 10 aa, Artificial Sequence
  Synthetic polypeptide
ALGGHPLLGV

SEQ ID NO: 620 - protein, 9 aa, Artificial Sequence
  Synthetic polypeptide
TMNGSKSPV

SEQ ID NO: 621 - protein, 9 aa, Artificial Sequence
  Synthetic polypeptide
RYQLDPKFI

SEQ ID NO: 622 - protein, 12 aa, Artificial Sequence
  Synthetic polypeptide
DVTFNIICKKCG

SEQ ID NO: 623 - protein, 9 aa, Artificial Sequence
  Synthetic polypeptide
FMVEDETVL

SEQ ID NO: 624 - protein, 10 aa, Artificial Sequence
  Synthetic polypeptide
FINDEIFVEL

SEQ ID NO: 625 - protein, 9 aa, Artificial Sequence
  Synthetic polypeptide
KYDCFLHPF

SEQ ID NO: 626 - protein, 9 aa, Artificial Sequence
  Synthetic polypeptide
KYVGIEREM

SEQ ID NO: 627 - protein, 10 aa, Artificial Sequence
  Synthetic polypeptide
NTYASPRFKF

SEQ ID NO: 628 - protein, 9 aa, Artificial Sequence
  Synthetic polypeptide
FVGEFFTDV

SEQ ID NO: 629 - protein, 9 aa, Artificial Sequence
  Synthetic polypeptide
EYILSLEEL

SEQ ID NO: 630 - protein, 9 aa, Artificial Sequence
  Synthetic polypeptide
HLSTAFARV

SEQ ID NO: 631 - protein, 9 aa, Artificial Sequence
  Synthetic polypeptide
KIFGSLAFL

SEQ ID NO: 632 - protein, 9 aa, Artificial Sequence
  Synthetic polypeptide
IISAVVGIL

SEQ ID NO: 633 - protein, 9 aa, Artificial Sequence
  Synthetic polypeptide
ALCRWGLLL

SEQ ID NO: 634 - protein, 9 aa, Artificial Sequence
  Synthetic polypeptide
ILHNGAYSL

SEQ ID NO: 635 - protein, 9 aa, Artificial Sequence
  Synthetic polypeptide
RLLQETELV

SEQ ID NO: 636 - protein, 9 aa, Artificial Sequence
  Synthetic polypeptide
VVLGVVFGI

SEQ ID NO: 637 - protein, 10 aa, Artificial Sequence
  Synthetic polypeptide
YMIMVKCWMI

SEQ ID NO: 638 - protein, 9 aa, Artificial Sequence
  Synthetic polypeptide
HLYQGCQVV

SEQ ID NO: 639 - protein, 10 aa, Artificial Sequence
  Synthetic polypeptide
YLVPQQGFFC

SEQ ID NO: 640 - protein, 9 aa, Artificial Sequence
  Synthetic polypeptide
PLQPEQLQV

SEQ ID NO: 641 - protein, 9 aa, Artificial Sequence
  Synthetic polypeptide
TLEEITGYL

SEQ ID NO: 642 - protein, 9 aa, Artificial Sequence
  Synthetic polypeptide
ALIHHNTHL

SEQ ID NO: 643 - protein, 9 aa, Artificial Sequence
  Synthetic polypeptide
PLTSIISAV

SEQ ID NO: 644 - protein, 9 aa, Artificial Sequence
  Synthetic polypeptide
VLRENTSPK

SEQ ID NO: 645 - protein, 9 aa, Artificial Sequence
  Synthetic polypeptide
TYLPTNASL

SEQ ID NO: 646 - protein, 9 aa, Artificial Sequence
  Synthetic polypeptide
FLLGLIFLL

SEQ ID NO: 647 - protein, 9 aa, Artificial Sequence
  Synthetic polypeptide
SLLSGDWVL

SEQ ID NO: 648 - protein, 9 aa, Artificial Sequence
  Synthetic polypeptide
GLQLGVQAV

SEQ ID NO: 649 - protein, 9 aa, Artificial Sequence
  Synthetic polypeptide
PLTEYIQPV

SEQ ID NO: 650 - protein, 9 aa, Artificial Sequence
  Synthetic polypeptide
ALLEIASCL

SEQ ID NO: 651 - protein, 9 aa, Artificial Sequence
  Synthetic polypeptide
NLSSAEVVV

SEQ ID NO: 652 - protein, 9 aa, Artificial Sequence
  Synthetic polypeptide
RLLVPTQFV

SEQ ID NO: 653 - protein, 9 aa, Artificial Sequence
  Synthetic polypeptide
WLPFGFILI

SEQ ID NO: 654 - protein, 9 aa, Artificial Sequence
  Synthetic polypeptide
SPRWWPTCL

SEQ ID NO: 655 - protein, 9 aa, Artificial Sequence
  Synthetic polypeptide
GVALQTMKQ

SEQ ID NO: 656 - protein, 9 aa, Artificial Sequence
  Synthetic polypeptide
FMNKFIYEI

SEQ ID NO: 657 - protein, 10 aa, Artificial Sequence
  Synthetic polypeptide
QLAVSVILRV

SEQ ID NO: 658 - protein, 9 aa, Artificial Sequence
  Synthetic polypeptide
FLGYLILGV

SEQ ID NO: 659 - protein, 15 aa, Artificial Sequence
  Synthetic polypeptide
SVSESDTIRSISIAS

SEQ ID NO: 660 - protein, 15 aa, Artificial Sequence
  Synthetic polypeptide
LLANGRMPTVLQCVN

SEQ ID NO: 661 - protein, 15 aa, Artificial Sequence
  Synthetic polypeptide
RMPTVLQCVNVSVVS

SEQ ID NO: 662 - protein, 9 aa, Artificial Sequence
  Synthetic polypeptide
LLSDDDVVV

SEQ ID NO: 663 - protein, 10 aa, Artificial Sequence
  Synthetic polypeptide
AQPDTAPLPV

SEQ ID NO: 664 - protein, 9 aa, Artificial Sequence
  Synthetic polypeptide
CIAEQYHTV

SEQ ID NO: 665 - protein, 10 aa, Artificial Sequence
  Synthetic polypeptide
FLPEFGISSA

SEQ ID NO: 666 - protein, 14 aa, Artificial Sequence
  Synthetic polypeptide
LPAVVGLSPGEQEY

SEQ ID NO: 667 - protein, 16 aa, Artificial Sequence
  Synthetic polypeptide
VGQDVSVLFRVTGALQ

SEQ ID NO: 668 - protein, 8 aa, Artificial Sequence
  Synthetic polypeptide
VLFYLGQY

SEQ ID NO: 669 - protein, 9 aa, Artificial Sequence
  Synthetic polypeptide
TLNDECWPA

SEQ ID NO: 670 - protein, 14 aa, Artificial Sequence
  Synthetic polypeptide
ERISSTLNDECWPA

SEQ ID NO: 671 - protein, 11 aa, Artificial Sequence
  Synthetic polypeptide
FGRLQGISPKI

SEQ ID NO: 672 - protein, 13 aa, Artificial Sequence
  Synthetic polypeptide
TSREQFLPSEGAA

SEQ ID NO: 673 - protein, 14 aa, Artificial Sequence
  Synthetic polypeptide
CPPWHPSERISSTL

SEQ ID NO: 674 - protein, 9 aa, Artificial Sequence
  Synthetic polypeptide
ALLALTSAV

SEQ ID NO: 675 - protein, 9 aa, Artificial Sequence
  Synthetic polypeptide
AQCQETIRV

SEQ ID NO: 676 - protein, 15 aa, Artificial Sequence
  Synthetic polypeptide
LTLLALLALTSAVAK

SEQ ID NO: 677 - protein, 10 aa, Artificial Sequence
  Synthetic polypeptide
GLPPDVQRVH

SEQ ID NO: 678 - protein, 12 aa, Artificial Sequence
  Synthetic polypeptide
SLFPNSPKWTSK

SEQ ID NO: 679 - protein, 9 aa, Artificial Sequence
  Synthetic polypeptide
STAPPVHNV

SEQ ID NO: 680 - protein, 9 aa, Artificial Sequence
  Synthetic polypeptide
LLLLTVLTV

SEQ ID NO: 681 - protein, 12 aa, Artificial Sequence
  Synthetic polypeptide
PGSTAPPAHGVT

SEQ ID NO: 682 - protein, 9 aa, Artificial Sequence
  Synthetic polypeptide
TCQPTCRSL

SEQ ID NO: 683 - protein, 9 aa, Artificial Sequence
  Synthetic polypeptide
LLGRNSFEV

SEQ ID NO: 684 - protein, 9 aa, Artificial Sequence
  Synthetic polypeptide
RMPEAAPPV

SEQ ID NO: 685 - protein, 9 aa, Artificial Sequence
  Synthetic polypeptide
SQKTYQGSY

SEQ ID NO: 686 - protein, 13 aa, Artificial Sequence
  Synthetic polypeptide
PGTRVRAMAIYKQ

SEQ ID NO: 687 - protein, 12 aa, Artificial Sequence
  Synthetic polypeptide
HLIRVEGNLRVE

SEQ ID NO: 688 - protein, 9 aa, Artificial Sequence
  Synthetic polypeptide
TLPGYPPHV

SEQ ID NO: 689 - protein, 12 aa, Artificial Sequence
  Synthetic polypeptide
CTACRWKKACQR

SEQ ID NO: 690 - protein, 9 aa, Artificial Sequence
  Synthetic polypeptide
VLDGLDVLL

SEQ ID NO: 691 - protein, 10 aa, Artificial Sequence
  Synthetic polypeptide
SLYSFPEPEA

SEQ ID NO: 692 - protein, 10 aa, Artificial Sequence
  Synthetic polypeptide
ALYVDSLFFL

SEQ ID NO: 693 - protein, 9 aa, Artificial Sequence
  Synthetic polypeptide
SLLQHLIGL

SEQ ID NO: 694 - protein, 10 aa, Artificial Sequence
  Synthetic polypeptide
LYVDSLFFLC

SEQ ID NO: 695 - protein, 9 aa, Artificial Sequence
  Synthetic polypeptide
NYARTEDFF

SEQ ID NO: 696 - protein, 9 aa, Artificial Sequence
  Synthetic polypeptide
LKLSGVVRL

SEQ ID NO: 697 - protein, 11 aa, Artificial Sequence
  Synthetic polypeptide
PLPPARNGGLG

SEQ ID NO: 698 - protein, 10 aa, Artificial Sequence
  Synthetic polypeptide
SPSSNRIRNT

SEQ ID NO: 699 - protein, 9 aa, Artificial Sequence
  Synthetic polypeptide
LAALPHSCL

SEQ ID NO: 700 - protein, 10 aa, Artificial Sequence
  Synthetic polypeptide
GLASFKSFLK

SEQ ID NO: 701 - protein, 10 aa, Artificial Sequence
  Synthetic polypeptide
RAGLQVRKNK

SEQ ID NO: 702 - protein, 10 aa, Artificial Sequence
  Synthetic polypeptide
ALWPWLLMAT

SEQ ID NO: 703 - protein, 9 aa, Artificial Sequence
  Synthetic polypeptide
NSQPVWLCL

SEQ ID NO: 704 - protein, 9 aa, Artificial Sequence
  Synthetic polypeptide
LPRWPPPQL

SEQ ID NO: 705 - protein, 9 aa, Artificial Sequence
  Synthetic polypeptide
KMDAEHPEL

SEQ ID NO: 706 - protein, 9 aa, Artificial Sequence
  Synthetic polypeptide
AWISKPPGV

SEQ ID NO: 707 - protein, 10 aa, Artificial Sequence
  Synthetic polypeptide
SAWISKPPGV

SEQ ID NO: 708 - protein, 9 aa, Artificial Sequence
  Synthetic polypeptide
MIAVFLPIV

SEQ ID NO: 709 - protein, 15 aa, Artificial Sequence
  Synthetic polypeptide
HQQYFYKIPILVINK

SEQ ID NO: 710 - protein, 10 aa, Artificial Sequence
  Synthetic polypeptide
ELTLGEFLKL

SEQ ID NO: 711 - protein, 15 aa, Artificial Sequence
  Synthetic polypeptide
TLGEFLKLDRERAKN

SEQ ID NO: 712 - protein, 10 aa, Artificial Sequence
  Synthetic polypeptide
ILAKFLHWLE

SEQ ID NO: 713 - protein, 9 aa, Artificial Sequence
  Synthetic polypeptide
RLVDDFLLV

SEQ ID NO: 714 - protein, 15 aa, Artificial Sequence
  Synthetic polypeptide
RPGLLGASVLGLDDI

SEQ ID NO: 715 - protein, 15 aa, Artificial Sequence
  Synthetic polypeptide
LTDLQPYMRQFVAHL

SEQ ID NO: 716 - protein, 10 aa, Artificial Sequence
  Synthetic polypeptide
WLFFYRKSVR

SEQ ID NO: 717 - protein, 9 aa, Artificial Sequence
  Synthetic polypeptide
RLARLALVL

SEQ ID NO: 718 - protein, 9 aa, Artificial Sequence
  Synthetic polypeptide
SRFGGAVVR

SEQ ID NO: 719 - protein, 11 aa, Artificial Sequence
  Synthetic polypeptide
TSEKRPFMCAY

SEQ ID NO: 720 - protein, 9 aa, Artificial Sequence
  Synthetic polypeptide
CMTWNQMNL

SEQ ID NO: 721 - protein, 11 aa, Artificial Sequence
  Synthetic polypeptide
LSHLQMHSRKH

SEQ ID NO: 722 - protein, 16 aa, Artificial Sequence
  Synthetic polypeptide
KRYFKLSHLQMHSRKH

SEQ ID NO: 723 - protein, 16 aa, Artificial Sequence
  Synthetic polypeptide
KRYFKLSHLQMHSRKH

SEQ ID NO: 724 - RNA, 20 nt, Artificial Sequence
  Synthetic polynucleotide
gccuucaccauuacugguaa

SEQ ID NO: 725 - RNA, 20 nt, Artificial Sequence
  Synthetic polynucleotide
ucacugcccaggugguccug

SEQ ID NO: 726 - RNA, 20 nt, Artificial Sequence
  Synthetic polynucleotide
augucuggaagaccuggggu

SEQ ID NO: 727 - RNA, 20 nt, Artificial Sequence
  Synthetic polynucleotide
ggccgcagggaucggcaucc

SEQ ID NO: 728 - RNA, 20 nt, Artificial Sequence
  Synthetic polynucleotide
acugcgugauccacaucaac

SEQ ID NO: 729 - RNA, 20 nt, Artificial Sequence
  Synthetic polynucleotide
auggaacaaugucccaggua

SEQ ID NO: 730 - RNA, 20 nt, Artificial Sequence
  Synthetic polynucleotide
cacacuuuucugcaucccgc

SEQ ID NO: 731 - RNA, 20 nt, Artificial Sequence
  Synthetic polynucleotide
auuaacccuuggugaauuuu

SEQ ID NO: 732 - RNA, 20 nt, Artificial Sequence
  Synthetic polynucleotide
cgcagagaugauggacguca

SEQ ID NO: 733 - RNA, 20 nt, Artificial Sequence
  Synthetic polynucleotide
aggugugacugugugggagc

SEQ ID NO: 734 - RNA, 20 nt, Artificial Sequence
  Synthetic polynucleotide
acuuuuggggccaaaccuua

SEQ ID NO: 735 - RNA, 20 nt, Artificial Sequence
  Synthetic polynucleotide
caucagccagugcaggaacu

SEQ ID NO: 736 - RNA, 20 nt, Artificial Sequence
  Synthetic polynucleotide
uucugaugcucggcucuucu

SEQ ID NO: 737 - RNA, 20 nt, Artificial Sequence
  Synthetic polynucleotide
gaaaagaugaaagccucgga

SEQ ID NO: 738 - RNA, 20 nt, Artificial Sequence
  Synthetic polynucleotide
caggucaugcauucaagcug

SEQ ID NO: 739 - RNA, 20 nt, Artificial Sequence
  Synthetic polynucleotide
ugauuccaggucaugcauuc

SEQ ID NO: 740 - RNA, 20 nt, Artificial Sequence
  Synthetic polynucleotide
gggaaggagccauuauaucc

SEQ ID NO: 741 - RNA, 20 nt, Artificial Sequence
  Synthetic polynucleotide
uaauguuaucacuauugauc

SEQ ID NO: 742 - RNA, 20 nt, Artificial Sequence
  Synthetic polynucleotide
accacugccaagcucacuau

SEQ ID NO: 743 - RNA, 20 nt, Artificial Sequence
  Synthetic polynucleotide
ccucaauaggaccacaguca

SEQ ID NO: 744 - RNA, 20 nt, Artificial Sequence
  Synthetic polynucleotide
uggggccacugucggcauca

SEQ ID NO: 745 - RNA, 20 nt, Artificial Sequence
  Synthetic polynucleotide
uccaaucaugaugccgacag

SEQ ID NO: 746 - RNA, 20 nt, Artificial Sequence
  Synthetic polynucleotide
guugguucauuuucugcucc

SEQ ID NO: 747 - RNA, 20 nt, Artificial Sequence
  Synthetic polynucleotide
aggugacaaggacauaggag

SEQ ID NO: 748 - RNA, 20 nt, Artificial Sequence
  Synthetic polynucleotide
aggugacaaggauguacaag

SEQ ID NO: 749 - RNA, 20 nt, Artificial Sequence
  Synthetic polynucleotide
agguggcaaagauguacaag

SEQ ID NO: 750 - RNA, 20 nt, Artificial Sequence
  Synthetic polynucleotide
aggcaggugacaagggugua

SEQ ID NO: 751 - RNA, 20 nt, Artificial Sequence
  Synthetic polynucleotide
ucagcugccaccuggggaca

SEQ ID NO: 752 - RNA, 20 nt, Artificial Sequence
  Synthetic polynucleotide
ucccucaccccaggucuucc

SEQ ID NO: 753 - RNA, 20 nt, Artificial Sequence
  Synthetic polynucleotide
ccugaaguuuuuggaaugaa

SEQ ID NO: 754 - RNA, 20 nt, Artificial Sequence
  Synthetic polynucleotide
cucauucugcuugaaauaag

SEQ ID NO: 755 - RNA, 20 nt, Artificial Sequence
  Synthetic polynucleotide
uguaagacagaaaaccacac

SEQ ID NO: 756 - RNA, 20 nt, Artificial Sequence
  Synthetic polynucleotide
cuucggccugcauggcuccg

SEQ ID NO: 757 - RNA, 20 nt, Artificial Sequence
  Synthetic polynucleotide
ccuaauaauguaucucuaac

SEQ ID NO: 758 - RNA, 20 nt, Artificial Sequence
  Synthetic polynucleotide
uccugguccugaaacaauug

SEQ ID NO: 759 - RNA, 20 nt, Artificial Sequence
  Synthetic polynucleotide
agcugaagggauuaaagcgg

SEQ ID NO: 760 - RNA, 20 nt, Artificial Sequence
  Synthetic polynucleotide
ucuagaaaaaucaaaacaac

SEQ ID NO: 761 - RNA, 20 nt, Artificial Sequence
  Synthetic polynucleotide
uggaagagaaaggggggaac

SEQ ID NO: 762 - RNA, 20 nt, Artificial Sequence
  Synthetic polynucleotide
ugagaagaaaggaaccaaau

SEQ ID NO: 763 - protein, 661 aa, Homo sapiens
MDLVLKRCLLHLAVIGALLAVGATKVPRNQDWLGVSRQLRTKAWNRQLYPEWTEAQRLDCWRGGQVSLKVSNDGPTLIGANASFSIALNFPGSQKVLPDGQVIWVNNTIINGSQVWGGQPVYPQETDDACIFPDGGPCPSGSWSQKRSFVYVWKTWGQYWQVLGGPVSGLSIGTGRAMLGTHTMEVTVYHRRGSRSYVPLAHSSSAFTITDQVPFSVSVSQLRALDGGNKHFLRNQPLTFALQLHDPSGYLAEADLSYTWDFGDSSGTLISRALVVTHTYLEPGPVTAQVVLQAAIPLTSCGSSPVPGTTDGHRPTAEAPNTTAGQVPTTEVVGTTPGQAPTAEPSGTTSVQVPTTEVISTAPVQMPTAESTGMTPEKVPVSEVMGTTLAEMSTPEATGMTPAEVSIVVLSGTTAAQVTTTEWVETTARELPIPEPEGPDASSIMSTESITGSLGPLLDGTATLRLVKRQVPLDCVLYRYGSFSVTLDIVQGIESAEILQAVPSGEGDAFELTVSCQGGLPKEACMEISSPGCQPPAQRLCQPVLPSPACQLVLHQILKGGSGTYCLNVSLADTNSLAVVSTQLIMPGQEAGLGQVPLIVGILLVLMAVVLASLIYRRRLMKQDFSVPQLPHSSSHWLRLPRIFCSCPIGENSPLLSGQQV

SEQ ID NO: 764 - protein, 118 aa, Homo sapiens
MPREDAHFIYGYPKKGHGHSYTTAEEAAGIGILTVILGVLLLIGCWYCRRRNGYRALMDKSLHVGTQCALTRRCPQEGFDHRDSKVSLQEKNCEPVVPNAPPAYEKLSAEQSPPPYSP

SEQ ID NO: 765 - protein, 537 aa, Homo sapiens
MSAPKLLSLGCIFFPLLLFQQARAQFPRQCATVEALRSGMCCPDLSPVSGPGTDRCGSSSGRGRCEAVTADSRPHSPQYPHDGRDDREVWPLRFFNRTCHCNGNFSGHNCGTCRPGWRGAACDQRVLIVRRNLLDLSKEEKNHFVRALDMAKRTTHPLFVIATRRSEEILGPDGNTPQFENISIYNYFVWTHYYSVKKTFLGVGQESFGEVDFSHEGPAFLTWHRYHLLRLEKDMQEMLQEPSFSLPYWNFATGKNVCDICTDDLMGSRSNFDSTLISPNSVFSQWRVVCDSLEDYDTLGTLCNSTEDGPIRRNPAGNVARPMVQRLPEPQDVAQCLEVGLFDTPPFYSNSTNSFRNTVEGYSDPTGKYDPAVRSLHNLAHLFLNGTGGQTHLSPNDPIFVLLHTFTDAVFDEWLRRYNADISTFPLENAPIGHNRQYNMVPFWPPVTNTEMFVTAPDNLGYTYEIQWPSREFSVPEIIAIAVVGALLLVALIFGTASYLIRARRSMDEANQPLLTDQYQCYAEEYEKLQNPNQSVV

SEQ ID NO: 766 - protein, 741 aa, Homo sapiens
MALFTPWKLSSQKLGFFLVTFGFIWGMMLLHFTIQQRTQPESSSMLREQILDLSKRYIKALAEENRNVVDGPYAGVMTAYDLKKTLAVLLDNILQRIGKLESKVDNLVVNGTGTNSTNSTTAVPSLVALEKINVADIINGAQEKCVLPPMDGYPHCEGKIKWMKDMWRSDPCYADYGVDGSTCSFFIYLSEVENWCPHLPWRAKNPYEEADHNSLAEIRTDFNILYSMMKKHEEFRWMRLRIRRMADAWIQAIKSLAEKQNLEKRKRKKVLVHLGLLTKESGFKIAETAFSGGPLGELVQWSDLITSLYLLGHDIRISASLAELKEIMKKVVGNRSGCPTVGDRIVELIYIDIVGLAQFKKTLGPSWVHYQCMLRVLDSFGTEPEFNHANYAQSKGHKTPWGKWNLNPQQFYTMFPHTPDNSFLGFVVEQHLNSSDIHHINEIKRQNQSLVYGKVDSFWKNKKIYLDIIHTYMEVHATVYGSSTKNIPSYVKNHGILSGRDLQFLLRETKLFVGLGFPYEGPAPLEAIANGCAFLNPKFNPPKSSKNTDFFIGKPTLRELTSQHPYAEVFIGRPHVWTVDLNNQEEVEDAVKAILNQKIEPYMPYEFTCEGMLQRINAFIEKQDFCHGQVMWPPLSALQVKLAEPGQSCKQVCQESQLICEPSFFQHLNKDKDMLKYKVTCQSSELAKDILVPSFDPKNKHCVFQGDLLLFSCAGAHPRHQRVCPCRDFIKGQVALCKDCL

SEQ ID NO: 767 - protein, 180 aa, Homo sapiens
MQAEGRGTGGSTGDADGPGGPGIPDGPGGNAGGPGEAGATGGRGPRGAGAARASGPGGGAPRGPHGGAASGLNGCCRCGARGPESRLLEFYLAMPFATPMEAELARRSLAQDAPPLPVPGVLLKEFTVSGNILTIRLTAADHRQLQLSISSCLQQLSLLMWITQCFLPVFLAQPPSGQRR

SEQ ID NO: 768 - protein, 109 aa, Homo sapiens [sequence omitted]

SEQ ID NO: 769 - protein, 519 aa, Homo sapiens
MSPLWWGFLLSCLGCKILPGAQGQFPRVCMTVDSLVNKECCPRLGAESANVCGSQQGRGQCTEVRADTRPWSGPYILRNQDDRELWPRKFFHRTCKCTGNFAGYNCGDCKFGWTGPNCERKKPPVIRQNIHSLSPQEREQFLGALDLAKKRVHPDYVITTQHWLGLLGPNGTQPQFANCSVYDFFVWLHYYSVRDTLLGPGRPYRAIDFSHQGPAFVTWHRYHLLCLERDLQRLIGNESFALPYWNFATGRNECDVCTDQLFGAARPDDPTLISRNSRFSSWETVCDSLDDYNHLVTLCNGTYEGLLRRNQMGRNSMKLPTLKDIRDCLSLQKFDNPPFFQNSTFSFRNALEGFDKADGTLDSQVMSLHNLVHSFLNGTNALPHSAANDPIFVVLHSFTDAIFDEWMKRFNPPADAWPQELAPIGHNRMYNMVPFFPPVTNEELFLTSDQLGYSYAIDLPVSVEETPGWPTTLLVVMGTLVALVGLFVLLAFLQYRRLRKGYTPLMETHLSSKRYTEEA

SEQ ID NO: 770 - protein, 529 aa, Homo sapiens [sequence omitted]

SEQ ID NO: 771 - protein, 142 aa, Homo sapiens
MGAPTLPPAWQPFLKDHRISTFKNWPFLEGCACTPERMAEAGFIHCPTENEPDLAQCFFCFKELEGWEPDDDPIEEHKKHSSGCAFLSVKKQFEELTLGEFLKLDRERAKNKIAKETNNKKKEFEETAKKVRRAIEQLAAMD

SEQ ID NO: 772 - protein, 1255 aa, Homo sapiens [sequence omitted]

SEQ ID NO: 773 - protein, 364 aa, Homo sapiens
MPLLLLLPLLWAGALAMDPNFWLQVQESVTVQEGLCVLVPCTFFHPIPYYDKNSPVHGYWFREGAIISRDSPVATNKLDQEVQEETQGRFRLLGDPSRNNCSLSIVDARRRDNGSYFFRMERGSTKYSYKSPQLSVHVTDLTHRPKILIPGTLEPGHSKNLTCSVSWACEQGTPPIFSWLSAAPTSLGPRTTHSSVLIITPRPQDHGTNLTCQVKFAGAGVTTERTIQLNVTYVPQNPTTGIFPGDGSGKQETRAGVVHGAIGGAGVTALLALCLCLIFFIVKTHRRKAARTAVGRNDTHPTTGSASPKHQKKSKLHGPTETSSCSGAAPTVEMDEELHYASLNFHGMNPSKDTSTEYSEVRTQ

SEQ ID NO: 774 - protein, 1132 aa, Homo sapiens
MPRAPRCRAVRSLLRSHYREVLPLATFVRRLGPQGWRLVQRGDPAAFRALVAQCLVCVPWDARPPPAAPSFRQVSCLKELVARVLQRLCERGAKNVLAFGFALLDGARGGPPEAFTTSVRSYLPNTVTDALRGSGAWGLLLRRVGDDVLVHLLARCALFVLVAPSCAYQVCGPPLYQLGAATQARPPPHASGPRRRLGCERAWNHSVREAGVPLGLPAPGARRRGGSASRSLPLPKRPRRGAAPEPERTPVGQGSWAHPGRTRGPSDRGFCVVSPARPAEEATSLEGALSGTRHSHPSVGRQHHAGPPSTSRPPRPWDTPCPPVYAETKHFLYSSGDKEQLRPSFLLSSLRPSLTGARRLVETIFLGSRPWMPGTPRRLPRLPQRYWQMRPLFLELLGNHAQCPYGVLLKTHCPLRAAVTPAAGVCAREKPQGSVAAPEEEDTDPRRLVQLLRQHSSPWQVYGFVRACLRRLVPPGLWGSRHNERRFLRNTKKFISLGKHAKLSLQELTWKMSVRDCAWLRRSPGVGCVPAAEHRLREEILAKFLHWLMSVYVVELLRSFFYVTETTFQKNRLFFYRKSVWSKLQSIGIRQHLKRVQLRELSEAEVRQHREARPALLTSRLRFIPKPDGLRPIVNMDYVVGARTFRREKRAERLTSRVKALFSVLNYERARRPGLLGASVLGLDDIHRAWRTFVLRVRAQDPPPELYFVKVDVTGAYDTIPQDRLTEVIASIIKPQNTYCVRRYAVVQKAAHGHVRKAFKSHVSTLTDLQPYMRQFVAHLQETSPLRDAVVIEQSSSLNEASSGLFDVFLRFMCHHAVRIRGKSYVQCQGIPQGSILSTLLCSLCYGDMENKLFAGIRRDGLLLRLVDDFLLVTPHLTHAKTFLRTLVRGVPEYGCVVNLRKTVVNFPVEDEALGGTAFVQMPAHGLFPWCGLLLDTRTLEVQSDYSSYARTSIRASLTFNRGFKAGRNMRRKLFGVLRLKCHSLFLDLQVNSLQTVCTNIYKILLLQAYRFHACVLQLPFHQQVWKNPTFFLRVISDTASLCYSILKAKNAGMSLGAKGAAGPLPSEAVQWLCHQAFLLKLTRHRVTYVPLLGSLRTAQTQLSRKLPGTTLTALEAAANPALPSDFKTILD

SEQ ID NO: 775 - protein, 188 aa, Homo sapiens
MNGDDAFARRPTVGAQIPEKIQKAFDDIAKYFSKEEWEKMKASEKIFYVYMKRKYEAMTKLGFKATLPPFMCNKRAEDFQGNDLDNDPNRGNQVERPQMTFGRLQGISPKIMPKKPAEEGNDSEEVPEASGPQNDGKELCPPGKPTTSEKIHERSGPKRGEHAWTHRLRERKQLVIYEEISDPEEDDE

SEQ ID NO: 776 - protein, 449 aa, Homo sapiens
MGSDVRDLNALLPAVPSLGGGGGCALPVSGAAQWAPVLDFAPPGASAYGSLGGPAPPPAPPPPPPPPPHSFIKQEPSWGGAEPHEEQCLSAFTVHFSGQFTGTAGACRYGPFGPPPPSQASSGQARMFPNAPYLPSCLESQPAIRNQGYSTVTFDGTPSYGHTPSHHAAQFPNHSFKHEDPMGQQGSLGEQQYSVPPPVYGCHTPTDSCTGSQALLLRTPYSSDNLYQMTSQLECMTWNQMNLGATLKGVAAGSSSSVKWTEGQSNHSTGYESDNHTTPILCGAQYRIHTHGVFRGIQDVRRVPGVAPTLVRSASETSEKRPFMCAYPGCNKRYFKLSHLQMHSRKHTGEKPYQCDFKDCERRFSRSDQLKRHQRRHTGVKPFQCKTCQRKFSRSDHLKTHTRTHTGKTSEKPFSCRWPSCQKKFARSDELVRHHNMHQRNMTKLQLAL

SEQ ID NO: 777 - protein, 123 aa, Homo sapiens
MRQRLLPSVTSLLLVALLFPGSSQARHVNHSATEALGELRERAPGQGTNGFQLLRHAVKRDLLPPRTPPYQVHISHQEARGPSFKICVGFLGPRWARGCSTGNEKYHLPYAARDLQTFFLPFW

SEQ ID NO: 778 - protein, 1633 aa, Homo sapiens
MVDPVGFAEAWKAQFPDSEPPRMELRSVGDIEQELERCKASIRRLEQEVNQERFRMIYLQTLLAKEKKSYDRQRWGFRRAAQAPDGASEPRASASRPQPAPADGADPPPAEEPEARPDGEGSPGKARPGTARRPGAAASGERDDRGPPASVAALRSNFERIRKGHGQPGADAEKPFYVNVEFHHERGLVKVNDKEVSDRISSLGSQAMQMERKKSQHGAGSSVGDASRPPYRGRSSESSCGVDGDYEDAELNPRFLKDNLIDANGGSRPPWPPLEYQPYQSIYVGGMMEGEGKGPLLRSQSTSEQEKRLTWPRRSYSPRSFEDCGGGYTPDCSSNENLTSSEEDFSSGQSSRVSPSPTTYRMFRDKSRSPSQNSQQSFDSSSPPTPQCHKRHRHCPVVVSEATIVGVRKTGQIWPNDGEGAFHGDADGSFGTPPGYGCAADRAEEQRRHQDGLPYIDDSPSSSPHLSSKGRGSRDALVSGALESTKASELDLEKGLEMRKWVLSGILASEETYLSHLEALLLPMKPLKAAATTSQPVLTSQQIETIFFKVPELYEIHKEFYDGLFPRVQQWSHQQRVGDLFQKLASQLGVYRVLGYNHNGEWCEAQTKNGQGWVPSNYITPVNSLEKHSWYHGPVSRNAAEYLLSSGINGSFLVRESESSPGQRSISLRYEGRVYHYRINTASDGKLYVSSESRFNTLAELVHHHSTVADGLITTLHYPAPKRNKPTVYGVSPNYDKWEMERTDITMKHKLGGGQYGEVYEGVWKKYSLTVAVKTLKEDTMEVEEFLKEAAVMKEIKHPNLVQLLGVCTREPPFYIITEFMTYGNLLDYLRECNRQEVNAVVLLYMATQISSAMEYLEKKNFIHRDLAARNCLVGENHLVKVADFGLSRLMTGDTYTAHAGAKFPIKWTAPESLAYNKFSIKSDVWAFGVLLWEIATYGMSPYPGIDLSQVYELLEKDYRMERPEGCPEKVYELMRACWQWNPSDRPSFAEIHQAFETMFQESSISDEVEKELGKQGVRGAVSTLLQAPELPTKTRTSRRAAEHRDTTDVPEMPHSKGQGESDPLDHEPAVSPLLPRKERGPPEGGLNEDERLLPKDKKTNLFSALIKKKKKTAPTPPKRSSSFREMDGQPERRGAGEEEGRDISNGALAFTPLDTADPAKSPKPSNGAGVPNGALRESGGSGFRSPHLWKKSSTLTSSRLATGEEEGGGSSSKRFLRSCSASCVPHGAKDTEWRSVTLPRDLQSTGRQFDSSTFGGHKSEKPALPRKRAGENRSDQVTRGTVTPPPRLVKKNEEAADEVFKDIMESSPGSSPPNLTPKPLRRQVTVAPASGLPHKEEAGKGSALGTPAAAEPVTPTSKAGSGAPGGTSKGPAEESRVRRHKHSSESPGRDKGKLSRLKPAPPPPPAASAGKAGGKPSQSPSQEAAGEAVLGAKTKATSLVDAVNSDAAKPSQPGEGLKKPVLPATPKPQSAKPSGTPISPAPVPSTLPSASSALAGDQPSSTAFIPLISTRVSLRKTRQPPERIASGAITKGVVLDSTEALCLAISRNSEQMASHSAVLEAGKNLYTFCVSYVDSIQQMRNKFAFREAINKLENNLRELQICPATAGSGPAATQDFSKLLSSVKEISDIVQR

SEQ ID NO: 779 - protein, 702 aa, Homo sapiens
MESPSAPPHRWCIPWQRLLLTASLLTFWNPPTTAKLTIESTPFNVAEGKEVLLLVHNLPQHLFGYSWYKGERVDGNRQIIGYVIGTQQATPGPAYSGREIIYPNASLLIQNIIQNDTGFYTLHVIKSDLVNEEATGQFRVYPELPKPSISSNNSKPVEDKDAVAFTCEPETQDATYLWWVNNQSLPVSPRLQLSNGNRTLTLFNVTRNDTASYKCETQNPVSARRSDSVILNVLYGPDAPTISPLNTSYRSGENLNLSCHAASNPPAQYSWFVNGTFQQSTQELFIPNITVNNSGSYTCQAHNSDTGLNRTTVTTITVYAEPPKPFITSNNSNPVEDEDAVALTCEPEIQNTTYLWWVNNQSLPVSPRLQLSNDNRTLTLLSVTRNDVGPYECGIQNKLSVDHSDPVILNVLYGPDDPTISPSYTYYRPGVNLSLSCHAASNPPAQYSWLIDGNIQQHTQELFISNITEKNSGLYTCQANNSASGHSRTTVKTITVSAELPKPSISSNNSKPVEDKDAVAFTCEPEAQNTTYLWWVNGQSLPVSPRLQLSNGNRTLTLFNVTRNDARAYVCGIQNSVSANRSDPVTLDVLYGPDTPIISPPDSSYLSGANLNLSCHSASNPSPQYSWRINGIPQQHTQVLFIAKITPNNNGTYACFVSNLATGRNNSIVKSITVSASGTSPGLSAGATVGIMIGVLVGVALI

SEQ ID NO: 780 - protein, 314 aa, Homo sapiens
MPLEQRSQHCKPEEGLEARGEALGLVGAQAPATEEQEAASSSSTLVEVTLGEVPAAESPDPPQSPQGASSLPTTMNYPLWSQSYEDSSNQEEEGPSTFPDLESEFQAALSRKVAELVHFLLLKYRAREPVTKAEMLGSVVGNWQYFFPVIFSKAFSSLQLVFGIELMEVDPIGHLYIFATCLGLSYDGLLGDNQIMPKAGLLIIVLAIIAREGDCAPEEKIWEELSVLEVFEGREDSILGDPKKLLTQHFVQENYLEYRQVPGSDPACYEFLWGPRALVETSYVKVLHHMVKISGGPHISYPPLHEWVLREGEE

SEQ ID NO: 781 - protein, 1255 aa, Homo sapiens
MTPGTQSPFFLLLLLTVLTVVTGSGHASSTPGGEKETSATQRSSVPSSTEKNAVSMTSSVLSSHSPGSGSSTTQGQDVTLAPATEPASGSAATWGQDVTSVPVTRPALGSTTPPAHDVTSAPDNKPAPGSTAPPAHGVTSAPDTRPAPGSTAPPAHGVTSAPDTRPAPGSTAPPAHGVTSAPDTRPAPGSTAPPAHGVTSAPDTRPAPGSTAPPAHGVTSAPDTRPAPGSTAPPAHGVTSAPDTRPAPGSTAPPAHGVTSAPDTRPAPGSTAPPAHGVTSAPDTRPAPGSTAPPAHGVTSAPDTRPAPGSTAPPAHGVTSAPDTRPAPGSTAPPAHGVTSAPDTRPAPGSTAPPAHGVTSAPDTRPAPGSTAPPAHGVTSAPDTRPAPGSTAPPAHGVTSAPDTRPAPGSTAPPAHGVTSAPDTRPAPGSTAPPAHGVTSAPDTRPAPGSTAPPAHGVTSAPDTRPAPGSTAPPAHGVTSAPDTRPAPGSTAPPAHGVTSAPDTRPAPGSTAPPAHGVTSAPDTRPAPGSTAPPAHGVTSAPDTRPAPGSTAPPAHGVTSAPDTRPAPGSTAPPAHGVTSAPDTRPAPGSTAPPAHGVTSAPDTRPAPGSTAPPAHGVTSAPDTRPAPGSTAPPAHGVTSAPDTRPAPGSTAPPAHGVTSAPDTRPAPGSTAPPAHGVTSAPDTRPAPGSTAPPAHGVTSAPDTRPAPGSTAPPAHGVTSAPDTRPAPGSTAPPAHGVTSAPDTRPAPGSTAPPAHGVTSAPDTRPAPGSTAPPAHGVTSAPDTRPAPGSTAPPAHGVTSAPDTRPAPGSTAPPAHGVTSAPDTRPAPGSTAPPAHGVTSAPDTRPAPGSTAPPAHGVTSAPDTRPAPGSTAPPAHGVTSAPDTRPAPGSTAPPAHGVTSAPDTRPAPGSTAPPAHGVTSAPDTRPAPGSTAPPAHGVTSAPDNRPALGSTAPPVHNVTSASGSASGSASTLVHNGTSARATTTPASKSTPFSIPSHHSDTPTTLASHSTKTDASSTHHSSVPPLTSSNHSTSPQLSTGVSFFFLSFHISNLQFNSSLEDPSTDYYQELQRDISEMFLQIYKQGGFLGLSNIKFRPGSVVVQLTLAFREGTINVHDVETQFNQYKTEAASRYNLTISDVSVSDVPFPFSAQSGAGVPGWGIALLVLVCVLVALAIVYLIALAVCQCRRKNYGQLDIFPARDTYHPMSEYPTYHTHGRYVPPSSTDRSPYEKVSAGNGGSSLSYTNPAVAATSANL

SEQ ID NO: 782 - protein, 314 aa, Homo sapiens
MAPPQVLAFGLLLAAATATFAAAQEECVCENYKLAVNCFVNNNRQCQCTSVGAQNTVICSKLAAKCLVMKAEMNGSKLGRRAKPEGALQNNDGLYDPDCDESGLFKAKQCNGTSMCWCVNTAGVRRTDKDTEITCSERVRTYWIIIELKHKAREKPYDSKSLRTALQKEITTRYQLDPKFITSILYENNVITIDLVQNSSQKTQNDVDIADVAYYFEKDVKGESLFHSKKMDLTVNGEQLDLDPGQTLIYYVDEKAPEFSMQGLKAGVIAVIVVVVIAVVAGIVVLVISRKKRMAKYEKAEIKEMGEMHRELNA

SEQ ID NO: 783 - protein, 30 aa, Artificial Sequence
  Synthetic polypeptide
  MISC_FEATURE (2)..(30): May be absent
GGGGGGGGGGGGGGGGGGGGGGGGGGGGGG

SEQ ID NO: 784 - protein, 90 aa, Artificial Sequence
  Synthetic polypeptide
  MISC_FEATURE (4)..(90): May be absent
GGSGGSGGSGGSGGSGGSGGSGGSGGSGGSGGSGGSGGSGGSGGSGGSGGSGGSGGSGGSGGSGGSGGSGGSGGSGGSGGSGGSGGSGGS

SEQ ID NO: 785 - protein, 60 aa, Artificial Sequence
  Synthetic polypeptide
  misc_feature (1)..(1): Xaa can be any naturally occurring amino acid
  MISC_FEATURE (3)..(60): May be absent
XPXPXPXPXPXPXPXPXPXPXPXPXPXPXPXPXPXPXPXPXPXPXPXPXPXPXPXPXPXP

SEQ ID NO: 786 - protein, 9 aa, Artificial Sequence
  Synthetic polypeptide
IIDQVPFSV

SEQ ID NO: 787 - protein, 9 aa, Artificial Sequence
  Synthetic polypeptide
KIWGQYWQV

SEQ ID NO: 788 - protein, 9 aa, Artificial Sequence
  Synthetic polypeptide
SLLMWITQY

SEQ ID NO: 789 - protein, 9 aa, Artificial Sequence
  Synthetic polypeptide
YMNGIMSQV

SEQ ID NO: 790 - protein, 12 aa, Artificial Sequence
  Synthetic polypeptide
DAEKYDICTDEY

SEQ ID NO: 791 - protein, 10 aa, Artificial Sequence
  Synthetic polypeptide
ELILGEFLKL

SEQ ID NO: 792 - protein, 10 aa, Artificial Sequence
  Synthetic polypeptide
ILAKFLHWLI

SEQ ID NO: 793 - protein, 10 aa, Artificial Sequence
  Synthetic polypeptide
AMVGILLVVV

SEQ ID NO: 794 - protein, 10 aa, Artificial Sequence
  Synthetic polypeptide
IIWELMTFGA

SEQ ID NO: 795 - protein, 10 aa, Artificial Sequence
  Synthetic polypeptide
ITWELMTFGV

SEQ ID NO: 796 - protein, 9 aa, Artificial Sequence
  Synthetic polypeptide
VIISGDSPV

SEQ ID NO: 797 - protein, 9 aa, Artificial Sequence
  Synthetic polypeptide
KVSEKIFYV

SEQ ID NO: 798 - protein, 9 aa, Artificial Sequence
  Synthetic polypeptide
YMTWNQMNL

SEQ ID NO: 799 - protein, 9 aa, Artificial Sequence
  Synthetic polypeptide
CITWNQMNL

SEQ ID NO: 800 - protein, 9 aa, Artificial Sequence
  Synthetic polypeptide
ILYENNVII

SEQ ID NO: 801 - protein, 9 aa, Artificial Sequence
  Synthetic polypeptide
LLTFWNPPI

SEQ ID NO: 802 - protein, 9 aa, Artificial Sequence
  Synthetic polypeptide
RITVTTITV

SEQ ID NO: 803 - protein, 9 aa, Artificial Sequence
  Synthetic polypeptide
AVVGIMIGV

SEQ ID NO: 804 - protein, 9 aa, Artificial Sequence
  Synthetic polypeptide
IMIGMLVGV

SEQ ID NO: 805 - protein, 9 aa, Artificial Sequence
  Synthetic polypeptide
KVAELVYFL

SEQ ID NO: 806 - protein, 10 aa, Artificial Sequence
  Synthetic polypeptide
YLGLSYDGLL

SEQ ID NO: 807 - protein, 10 aa, Artificial Sequence
  Synthetic polypeptide
AIWGQDVTSV

SEQ ID NO: 808 - protein, 9 aa, Artificial Sequence
  Synthetic polypeptide
VYFFLPDHL

SEQ ID NO: 809 - protein, 9 aa, Artificial Sequence
  Synthetic polypeptide
MSLQRQFLR

SEQ ID NO: 810 - protein, 10 aa, Artificial Sequence
  Synthetic polypeptide
VLPDVFIRCV

SEQ ID NO: 811 - protein, 11 aa, Artificial Sequence
  Synthetic polypeptide
MLMAQEALAFL

SEQ ID NO: 812 - protein, 10 aa, Artificial Sequence
  Synthetic polypeptide
LAAQERRVPR

SEQ ID NO: 813 - protein, 9 aa, Artificial Sequence
  Synthetic polypeptide
APRGVRMAV

SEQ ID NO: 814 - protein, 20 aa, Artificial Sequence
  Synthetic polypeptide
QGAMLAAQERRVPRAAEVPR

SEQ ID NO: 815 - protein, 22 aa, Artificial Sequence
  Synthetic polypeptide
CLSRRPWKRSWSAGSCPGMPHL

SEQ ID NO: 816 - protein, 10 aa, Artificial Sequence
  Synthetic polypeptide
EVISCKLIKR

SEQ ID NO: 817 - protein, 9 aa, Artificial Sequence
  Synthetic polypeptide
AYACNTSTL

SEQ ID NO: 818 - protein, 9 aa, Artificial Sequence
  Synthetic polypeptide
YLEPGPVTV

SEQ ID NO: 819 - protein, 10 aa, Artificial Sequence
  Synthetic polypeptide
EVAGIGILTV

SEQ ID NO: 820 - protein, 36 aa, Artificial Sequence
  Synthetic polypeptide
  misc_feature (2)..(2): Xaa can be any naturally occurring amino acid
  misc_feature (4)..(26): Xaa can be any naturally occurring amino acid
  MISC_FEATURE (27)..(29): May be absent
  misc_feature (32)..(33): Xaa can be any naturally occurring amino acid
  MISC_FEATURE (34)..(35): May be absent
HXEXXXXXXXXXXXXXXXXXXXXXXXXXXPCXXXXC

SEQ ID NO: 821 - protein, 1368 aa, Artificial Sequence
  Synthetic polypeptide
MDKKYSIGLAIGTNSVGWAVITDEYKVPSKKFKVLGNTDRHSIKKNLIGALLFDSGETAEATRLKRTARRRYTRRKNRICYLQEIFSNEMAKVDDSFFHRLEESFLVEEDKKHERHPIFGNIVDEVAYHEKYPTIYHLRKKLVDSTDKADLRLIYLALAHMIKFRGHFLIEGDLNPDNSDVDKLFIQLVQTYNQLFEENPINASGVDAKAILSARLSKSRRLENLIAQLPGEKKNGLFGNLIALSLGLTPNFKSNFDLAEDAKLQLSKDTYDDDLDNLLAQIGDQYADLFLAAKNLSDAILLSDILRVNTEITKAPLSASMIKRYDEHHQDLTLLKALVRQQLPEKYKEIFFDQSKNGYAGYIDGGASQEEFYKFIKPILEKMDGTEELLVKLNREDLLRKQRTFDNGSIPHQIHLGELHAILRRQEDFYPFLKDNREKIEKILTFRIPYYVGPLARGNSRFAWMTRKSEETITPWNFEEVVDKGASAQSFIERMTNFDKNLPNEKVLPKHSLLYEYFTVYNELTKVKYVTEGMRKPAFLSGEQKKAIVDLLFKTNRKVTVKQLKEDYFKKIECFDSVEISGVEDRFNASLGTYHDLLKIIKDKDFLDNEENEDILEDIVLTLTLFEDREMIEERLKTYAHLFDDKVMKQLKRRRYTGWGRLSRKLINGIRDKQSGKTILDFLKSDGFANRNFMQLIHDDSLTFKEDIQKAQVSGQGDSLHEHIANLAGSPAIKKGILQTVKVVDELVKVMGRHKPENIVIEMARENQTTQKGQKNSRERMKRIEEGIKELGSQILKEHPVENTQLQNEKLYLYYLQNGRDMYVDQELDINRLSDYDVDHIVPQSFLKDDSIDNKVLTRSDKNRGKSDNVPSEEVVKKMKNYWRQLLNAKLITQRKFDNLTKAERGGLSELDKAGFIKRQLVETRQITKHVAQILDSRMNTKYDENDKLIREVKVITLKSKLVSDFRKDFQFYKVREINNYHHAHDAYLNAVVGTALIKKYPKLESEFVYGDYKVYDVRKMIAKSEQEIGKATAKYFFYSNIMNFFKTEITLANGEIRKRPLIETNGETGEIVWDKGRDFATVRKVLSMPQVNIVKKTEVQTGGFSKESILPKRNSDKLIARKKDWDPKKYGGFVSPTVAYSVLVVAKVEKGKSKKLKSVKELLGITIMERSSFEKNPIDFLEAKGYKEVKKDLIIKLPKYSLFELENGRKRMLASARELQKGNELALPSKYVNFLYLASHYEKLKGSPEDNEQKQLFVEQHKHYLDEIIEQISEFSKRVILADANLDKVLSAYNKHRDKPIREQAENIIHLFTLTNLGAPAAFKYFDTTIDRKEYRSTKEVLDATLIHQSITGLYETRIDLSQLGGD

SEQ ID NO: 822 - protein, 1368 aa, Artificial Sequence
  Synthetic polypeptide
MDKKYSIGLAIGTNSVGWAVITDEYKVPSKKFKVLGNTDRHSIKKNLIGALLFDSGETAEATRLKRTARRRYTRRKNRICYLQEIFSNEMAKVDDSFFHRLEESFLVEEDKKHERHPIFGNIVDEVAYHEKYPTIYHLRKKLVDSTDKADLRLIYLALAHMIKFRGHFLIEGDLNPDNSDVDKLFIQLVQTYNQLFEENPINASGVDAKAILSARLSKSRRLENLIAQLPGEKKNGLFGNLIALSLGLTPNFKSNFDLAEDAKLQLSKDTYDDDLDNLLAQIGDQYADLFLAAKNLSDAILLSDILRVNTEITKAPLSASMIKRYDEHHQDLTLLKALVRQQLPEKYKEIFFDQSKNGYAGYIDGGASQEEFYKFIKPILEKMDGTEELLVKLNREDLLRKQRTFDNGSIPHQIHLGELHAILRRQEDFYPFLKDNREKIEKILTFRIPYYVGPLARGNSRFAWMTRKSEETITPWNFEEVVDKGASAQSFIERMTNFDKNLPNEKVLPKHSLLYEYFTVYNELTKVKYVTEGMRKPAFLSGEQKKAIVDLLFKTNRKVTVKQLKEDYFKKIECFDSVEISGVEDRFNASLGTYHDLLKIIKDKDFLDNEENEDILEDIVLTLTLFEDREMIEERLKTYAHLFDDKVMKQLKRRRYTGWGRLSRKLINGIRDKQSGKTILDFLKSDGFANRNFMQLIHDDSLTFKEDIQKAQVSGQGDSLHEHIANLAGSPAIKKGILQTVKVVDELVKVMGRHKPENIVIEMARENQTTQKGQKNSRERMKRIEEGIKELGSQILKEHPVENTQLQNEKLYLYYLQNGRDMYVDQELDINRLSDYDVDHIVPQSFLKDDSIDNKVLTRSDKNRGKSDNVPSEEVVKKMKNYWRQLLNAKLITQRKFDNLTKAERGGLSELDKAGFIKRQLVETRQITKHVAQILDSRMNTKYDENDKLIREVKVITLKSKLVSDFRKDFQFYKVREINNYHHAHDAYLNAVVGTALIKKYPKLESEFVYGDYKVYDVRKMIAKSEQEIGKATAKYFFYSNIMNFFKTEITLANGEIRKRPLIETNGETGEIVWDKGRDFATVRKVLSMPQVNIVKKTEVQTGGFSKESILPKRNSDKLIARKKDWDPKKYGGFVSPTVAYSVLVVAKVEKGKSKKLKSVKELLGITIMERSSFEKNPIDFLEAKGYKEVKKDLIIKLPKYSLFELENGRKRMLASAGELQKGNELALPSKYVNFLYLASHYEKLKGSPEDNEQKQLFVEQHKHYLDEIIEQISEFSKRVILADANLDKVLSAYNKHRDKPIREQAENIIHLFTLTNLGAPAAFKYFDTTIDRKQYRSTKEVLDATLIHQSITGLYETRIDLSQLGGD

SEQ ID NO: 823 - protein, 1368 aa, Artificial Sequence
  Synthetic polypeptide
MDKKYSIGLAIGTNSVGWAVITDEYKVPSKKFKVLGNTDRHSIKKNLIGALLFDSGETAEATRLKRTARRRYTRRKNRICYLQEIFSNEMAKVDDSFFHRLEESFLVEEDKKHERHPIFGNIVDEVAYHEKYPTIYHLRKKLVDSTDKADLRLIYLALAHMIKFRGHFLIEGDLNPDNSDVDKLFIQLVQTYNQLFEENPINASGVDAKAILSARLSKSRRLENLIAQLPGEKKNGLFGNLIALSLGLTPNFKSNFDLAEDAKLQLSKDTYDDDLDNLLAQIGDQYADLFLAAKNLSDAILLSDILRVNTEITKAPLSASMIKRYDEHHQDLTLLKALVRQQLPEKYKEIFFDQSKNGYAGYIDGGASQEEFYKFIKPILEKMDGTEELLVKLNREDLLRKQRTFDNGSIPHQIHLGELHAILRRQEDFYPFLKDNREKIEKILTFRIPYYVGPLARGNSRFAWMTRKSEETITPWNFEEVVDKGASAQSFIERMTNFDKNLPNEKVLPKHSLLYEYFTVYNELTKVKYVTEGMRKPAFLSGEQKKAIVDLLFKTNRKVTVKQLKEDYFKKIECFDSVEISGVEDRFNASLGTYHDLLKIIKDKDFLDNEENEDILEDIVLTLTLFEDREMIEERLKTYAHLFDDKVMKQLKRRRYTGWGRLSRKLINGIRDKQSGKTILDFLKSDGFANRNFMQLIHDDSLTFKEDIQKAQVSGQGDSLHEHIANLAGSPAIKKGILQTVKVVDELVKVMGRHKPENIVIEMARENQTTQKGQKNSRERMKRIEEGIKELGSQILKEHPVENTQLQNEKLYLYYLQNGRDMYVDQELDINRLSDYDVDHIVPQSFLKDDSIDNKVLTRSDKNRGKSDNVPSEEVVKKMKNYWRQLLNAKLITQRKFDNLTKAERGGLSELDKAGFIKRQLVETRQITKHVAQILDSRMNTKYDENDKLIREVKVITLKSKLVSDFRKDFQFYKVREINNYHHAHDAYLNAVVGTALIKKYPKLESEFVYGDYKVYDVRKMIAKSEQEIGKATAKYFFYSNIMNFFKTEITLANGEIRKRPLIETNGETGEIVWDKGRDFATVRKVLSMPQVNIVKKTEVQTGGFSKESILPKRNSDKLIARKKDWDPKKYGGFESPTVAYSVLVVAKVEKGKSKKLKSVKELLGITIMERSSFEKNPIDFLEAKGYKEVKKDLIIKLPKYSLFELENGRKRMLASAGELQKGNELALPSKYVNFLYLASHYEKLKGSPEDNEQKQLFVEQHKHYLDEIIEQISEFSKRVILADANLDKVLSAYNKHRDKPIREQAENIIHLFTLTNLGAPAAFKYFDTTIDRKQYRSTKEVLDATLIHQSITGLYETRIDLSQLGGD

SEQ ID NO: 824 - protein, 1388 aa, Artificial Sequence
  Synthetic polypeptide
MTKPYSIGLAIGTNSVGWAVITDNYKVPSKKMKVLGNTSKKYIKKNLLGVLLFDSGITAEGRRLKRTARRRYTRRRNRILYLQEIFSTEMATLDDAFFQRLDDSFLVPDDKRDSKYPIFGNLVEEKVYHDEFPTIYHLRKYLADSTKKADLRLVYLALAHMIKYRGHFLIEGEFNSKNNDIQKNFQDFLDTYNAIFESDLSLENSKQLEEIVKDKISKLEKKDRILKLFPGEKNSGIFSEFLKLIVGNQADFRKCFNLDEKASLHFSKESYDEDLETLLGYIGDDYSDVFLKAKKLYDAILLSGFLTVTDNETEAPLSSAMIKRYNEHKEDLALLKEYIRNISLKTYNEVFKDDTKNGYAGYIDGKTNQEDFYVYLKNLLAEFEGADYFLEKIDREDFLRKQRTFDNGSIPYQIHLQEMRAILDKQAKFYPFLAKNKERIEKILTFRIPYYVGPLARGNSDFAWSIRKRNEKITPWNFEDVIDKESSAEAFINRMTSFDLYLPEEKVLPKHSLLYETFNVYNELTKVRFIAESMRDYQFLDSKQKKDIVRLYFKDKRKVTDKDIIEYLHAIYGYDGIELKGIEKQFNSSLSTYHDLLNIINDKEFLDDSSNEAIIEEIIHTLTIFEDREMIKQRLSKFENIFDKSVLKKLSRRHYTGWGKLSAKLINGIRDEKSGNTILDYLIDDGISNRNFMQLIHDDALSFKKKIQKAQIIGDEDKGNIKEVVKSLPGSPAIKKGILQSIKIVDELVKVMGGRKPESIVVEMARENQYTNQGKSNSQQRLKRLEKSLKELGSKILKENIPAKLSKIDNNALQNDRLYLYYLQNGKDMYTGDDLDIDRLSNYDIDHIIPQAFLKDNSIDNKVLVSSASNRGKSDDFPSLEVVKKRKTFWYQLLKSKLISQRKFDNLTKAERGGLLPEDKAGFIQRQLVETRQITKHVARLLDEKFNNKKDENNRAVRTVKIITLKSTLVSQFRKDFELYKVREINDFHHAHDAYLNAVIASALLKKYPKLEPEFVYGDYPKYNSFRERKSATEKVYFYSNIMNIFKKSISLADGRVIERPLIEVNEETGESVWNKESDLATVRRVLSYPQVNVVKKVEEQNHGLDRGKPKGLFNANLSSKPKPNSNENLVGAKEYLDPKKYGGYAGISNSFAVLVKGTIEKGAKKKITNVLEFQGISILDRINYRKDKLNFLLEKGYKDIELIIELPKYSLFELSDGSRRMLASILSTNNKRGEIHKGNQIFLSQKFVKLLYHAKRISNTINENHRKYVENHKKEFEELFYYILEFNENYVGAKKNGKLLNSAFQSWQNHSIDELCSSFIGPTGSERKGLFELTSRGSAADFEFLGVKIPRYRDYTPSSLLKDATLIHQSVTGLYETRIDLAKLGEG

SEQ ID NO: 825 - protein, 4 aa, Artificial Sequence
  Synthetic polypeptide
AGVF

SEQ ID NO: 826 - protein, 4 aa, Artificial Sequence
  Synthetic polypeptide
GFLG

SEQ ID NO: 827 - protein, 4 aa, Artificial Sequence
  Synthetic polypeptide
ALAL

SEQ ID NO: 828 - protein, 5 aa, Artificial Sequence
  Synthetic polypeptide
ALALA

SEQ ID NO: 829 - protein, 7 aa, Artificial Sequence
  Synthetic polypeptide
PKKKRKV

SEQ ID NO: 830 - protein, 30 aa, Artificial Sequence
  Synthetic polypeptide
MDSLLMNRRKFLYQFKNVRWAKGRRETYLC

SEQ ID NO: 831 - DNA, 34 bp, Artificial Sequence
  Synthetic polynucleotide
ttcaccattactggtaagggtttaggaaggggca

SEQ ID NO: 832 - DNA, 36 bp, Artificial Sequence
  Synthetic polynucleotide
agtcactgcccaggtggtcctgcaggctgccattcc

SEQ ID NO: 833 - DNA, 36 bp, Artificial Sequence
  Synthetic polynucleotide
tatgtctggaagacctggggtgagggactcccttct

SEQ ID NO: 834 - DNA, 46 bp, Artificial Sequence
  Synthetic polynucleotide
tggtccagggccgcagggatcggcatcctgatcgtggtcctgggga

SEQ ID NO: 835 - DNA, 39 bp, Artificial Sequence
  Synthetic polynucleotide
ctttccctgttgatgtggatcacgcagtgctttctgccc

SEQ ID NO: 836 - DNA, 37 bp, Artificial Sequence
  Synthetic polynucleotide
tatgaatggaacaatgtcccaggtacagggatctgcc

SEQ ID NO: 837 - DNA, 54 bp, Artificial Sequence
  Synthetic polynucleotide
tgggactggcgggatgcagaaaagtgtgacatttgcacagatgagtacatggga

SEQ ID NO: 838 - DNA, 39 bp, Artificial Sequence
  Synthetic polynucleotide
tttgaagaattaacccttggtgaatttttgaaactggac

SEQ ID NO: 839 - DNA, 60 bp, Artificial Sequence
  Synthetic polynucleotide
gcttccgcccccagccctctgacgtccatcatctctgcggtggttggcattctgctggtc

SEQ ID NO: 840 - DNA, 73 bp, Artificial Sequence
  Synthetic polynucleotide
aggtgtgactgtgtgggagctgatgacttttggggccaaaccttacgatgggatcccagcccgggagatccct

SEQ ID NO: 841 - DNA, 41 bp, Artificial Sequence
  Synthetic polynucleotide
gacttttggggccaaaccttacgatgggatcccagcccggg

SEQ ID NO: 842 - DNA, 60 bp, Artificial Sequence
  Synthetic polynucleotide
cgtgaggagatcctggccaagttcctgcactggctgatgagtgtgtacgtcgtcgagctg

SEQ ID NO: 843 - DNA, 53 bp, Artificial Sequence
  Synthetic polynucleotide
cccaagcctatcttttctgatgctcggctcttcttggtcacctctccgttcca

SEQ ID NO: 844 - DNA, 67 bp, Artificial Sequence
  Synthetic polynucleotide
ggaaaagatgaaagcctcggagaaaatcttctatgtgtatatgaagagaaagtatgaggctatgact

SEQ ID NO: 845 - DNA, 42 bp, Artificial Sequence
  Synthetic polynucleotide
atttataccaaatgacatcccagcttgaatgcatgacctgga

SEQ ID NO: 846 - DNA, 49 bp, Artificial Sequence
  Synthetic polynucleotide
atttataccaaatgacatcccagcttgaatgcatgacctggaatcagat

SEQ ID NO: 847 - DNA, 43 bp, Artificial Sequence
  Synthetic polynucleotide
ctggttccgggaaggagccattatatccagggactctccagtg

SEQ ID NO: 848 - DNA, 45 bp, Artificial Sequence
  Synthetic polynucleotide
atgagaataatgttatcactattgatctggttcaaaattcttctc

SEQ ID NO: 849 - DNA, 54 bp, Artificial Sequence
  Synthetic polynucleotide
taaccttctggaacccgcccaccactgccaagctcactattgaatccacgccgt

SEQ ID NO: 850 - DNA, 63 bp, Artificial Sequence
  Synthetic polynucleotide
gacactggcctcaataggaccacagtcacgacgatcacagtctatggtaagtggatccacgaa

SEQ ID NO: 851 - DNA, 60 bp, Artificial Sequence
  Synthetic polynucleotide
tctcctggtctctcagctggggccactgtcggcatcatgattggagtgctggttggggtt

SEQ ID NO: 852 - DNA, 50 bp, Artificial Sequence
  Synthetic polynucleotide
tctcagctggggccactgtcggcatcatgattggagtgctggttggggtt

SEQ ID NO: 853 - DNA, 58 bp, Artificial Sequence
  Synthetic polynucleotide
aggtggccgagttggttcattttctgctcctcaagtatcgagccagggagccggtcac

SEQ ID NO: 854 - DNA, 37 bp, Artificial Sequence
  Synthetic polynucleotide
ctatgtccttgtcacctgcctaggtctctcctatgat

SEQ ID NO: 855 - DNA, 36 bp, Artificial Sequence
  Synthetic polynucleotide
tacatccttgtcacctgcctgggcctctcctacgat

SEQ ID NO: 856 - DNA, 36 bp, Artificial Sequence
  Synthetic polynucleotide
gtacatctttgccacctgcctgggcctctcctacga

SEQ ID NO: 857 - DNA, 36 bp, Artificial Sequence
  Synthetic polynucleotide
tacacccttgtcacctgcctgggcctttcctatgat

SEQ ID NO: 858 - DNA, 51 bp, Artificial Sequence
  Synthetic polynucleotide
tcagctgccacctggggacaggatgtcacctcggtcccagtcaccaggcca

SEQ ID NO: 859 - DNA, 63 bp, Artificial Sequence
  Synthetic polynucleotide
aagctttgtttatgtctggaagacctggggtgagggactcccttctcagcctatcatccacac

SEQ ID NO: 860 - DNA, 32 bp, Artificial Sequence
  Synthetic polynucleotide
ccaaaaacttcaggccaatactggcaagttct

SEQ ID NO: 861 - DNA, 34 bp, Artificial Sequence
  Synthetic polynucleotide
gcactcttatttcaagcagaatgagtgctcctaa

SEQ ID NO: 862 - DNA, 51 bp, Artificial Sequence
  Synthetic polynucleotide
tcatacgctgtgtggttttctgtcttacagttgtttgttggacttgggttc

SEQ ID NO: 863 - DNA, 46 bp, Artificial Sequence
  Synthetic polynucleotide
tctctgagagccgggcagaggctccggagccatgcaggccgaaggc

SEQ ID NO: 864 - DNA, 38 bp, Artificial Sequence
  Synthetic polynucleotide
tattctgttagagatacattattaggtgggttttttcc

SEQ ID NO: 865 - DNA, 36 bp, Artificial Sequence
  Synthetic polynucleotide
tatgtttcccaattgtttcaggaccaggacgcccct

SEQ ID NO: 866 - DNA, 43 bp, Artificial Sequence
  Synthetic polynucleotide
agtggactgccgctttaatcccttcagctgcctttccgctgtt

SEQ ID NO: 867 - DNA, 37 bp, Artificial Sequence
  Synthetic polynucleotide
tccgctgttgttttgatttttctagagaggaacataa

SEQ ID NO: 868 - DNA, 31 bp, Artificial Sequence
  Synthetic polynucleotide
tcccccctttctcttccagaagcccttcagc

SEQ ID NO: 869 - DNA, 32 bp, Artificial Sequence
  Synthetic polynucleotide
tcctttcttctcaggtgaaaagctccgggtct

SEQ ID NO: 870 - RNA, 20 nt, Artificial Sequence
  Synthetic polynucleotide
caccauuacugguaaggguu

SEQ ID NO: 871 - RNA, 20 nt, Artificial Sequence
  Synthetic polynucleotide
accauuacugguaaggguuu

SEQ ID NO: 872 - RNA, 20 nt, Artificial Sequence
  Synthetic polynucleotide
ccauuacugguaaggguuua

SEQ ID NO: 873 - RNA, 20 nt, Artificial Sequence
  Synthetic polynucleotide
auuacugguaaggguuuagg

SEQ ID NO: 874 - RNA, 20 nt, Artificial Sequence
  Synthetic polynucleotide
uuacugguaaggguuuagga

SEQ ID NO: 875 - RNA, 20 nt, Artificial Sequence
  Synthetic polynucleotide
uacugguaaggguuuaggaa

SEQ ID NO: 876 - RNA, 20 nt, Artificial Sequence
  Synthetic polynucleotide
acugguaaggguuuaggaag

SEQ ID NO: 877 - RNA, 20 nt, Artificial Sequence
  Synthetic polynucleotide
cagccuucaccauuacuggu

SEQ ID NO: 878 - protein, 9 aa, Artificial Sequence
  Synthetic polypeptide
  misc_feature (1)..(1): Xaa can be any naturally occurring amino acid
  MISC_FEATURE (2)..(2): Xaa can be T or  I or any naturally occurring amino acid
  misc_feature (3)..(8): Xaa can be any naturally occurring amino acid
  MISC_FEATURE (9)..(9): Xaa can be Y or W or F
XXXXXXXXX

SEQ ID NO: 879 - protein, 9 aa, Artificial Sequence
  Synthetic polypeptide
  misc_feature (1)..(1): Xaa can be any naturally occurring amino acid
  MISC_FEATURE (2)..(2): Xaa can be L or I or V or M or A or T
  misc_feature (3)..(8): Xaa can be any naturally occurring amino acid
  MISC_FEATURE (9)..(9): Xaa can be L or I or V or M or A or T
XXXXXXXXX

SEQ ID NO: 880 - protein, 9 aa, Artificial Sequence
  Synthetic polypeptide
  misc_feature (1)..(1): Xaa can be any naturally occurring amino acid
  MISC_FEATURE (2)..(2): Xaa can be A or L or I or M or V
  misc_feature (3)..(8): Xaa can be any naturally occurring amino acid
  MISC_FEATURE (9)..(9): Xaa can be F or Y or W or any naturally occurring amino acid
XXXXXXXXX

SEQ ID NO: 881 - protein, 9 aa, Artificial Sequence
  Synthetic polypeptide
  misc_feature (1)..(1): Xaa can be any naturally occurring amino acid
  MISC_FEATURE (2)..(2): Xaa can be F or Y
  misc_feature (3)..(8): Xaa can be any naturally occurring amino acid
  MISC_FEATURE (9)..(9): Xaa can be F or I
XXXXXXXXX

SEQ ID NO: 882 - protein, 9 aa, Artificial Sequence
  Synthetic polypeptide
  misc_feature (1)..(1): Xaa can be any naturally occurring amino acid
  misc_feature (3)..(8): Xaa can be any naturally occurring amino acid
  MISC_FEATURE (9)..(9): Xaa can be A or L or I or V or M or Y or F or W
XPXXXXXXX

SEQ ID NO: 883 - protein, 9 aa, Artificial Sequence
  Synthetic polypeptide
  misc_feature (1)..(1): Xaa can be any naturally occurring amino acid
  MISC_FEATURE (2)..(2): Xaa can be R or H or K
  misc_feature (3)..(8): Xaa can be any naturally occurring amino acid
  MISC_FEATURE (9)..(9): Xaa can be F or L or Y
XXXXXXXXX

SEQ ID NO: 884 - protein, 9 aa, Artificial Sequence
  Synthetic polypeptide
  misc_feature (1)..(1): Xaa can be any naturally occurring amino acid
  misc_feature (3)..(8): Xaa can be any naturally occurring amino acid
  MISC_FEATURE (9)..(9): Xaa can be Y or F or W
XEXXXXXXX

SEQ ID NO: 885 - protein, 9 aa, Artificial Sequence
  Synthetic polypeptide
  misc_feature (1)..(1): Xaa can be any naturally occurring amino acid
  MISC_FEATURE (2)..(2): Xaa can be A or S or T
  misc_feature (3)..(8): Xaa can be any naturally occurring amino acid
  MISC_FEATURE (9)..(9): Xaa can be F or W or Y
XXXXXXXXX

SEQ ID NO: 886 - protein, 9 aa, Artificial Sequence
  Synthetic polypeptide
  misc_feature (1)..(1): Xaa can be any naturally occurring amino acid
  MISC_FEATURE (2)..(2): Xaa can be Q or L or any naturally occurring amino acid
  misc_feature (3)..(8): Xaa can be any naturally occurring amino acid
  MISC_FEATURE (9)..(9): Xaa can be F or W or Y
XXXXXXXXX

SEQ ID NO: 887 - skipped

SEQ ID NO: 888 - RNA, 20 nt, Artificial Sequence
  Synthetic polynucleotide
uuacugguaaggguuuagga

SEQ ID NO: 889 - RNA, 20 nt, Artificial Sequence
  Synthetic polynucleotide
cacugcccaggugguccugc

SEQ ID NO: 890 - RNA, 20 nt, Artificial Sequence
  Synthetic polynucleotide
ugucuggaagaccuggggug

SEQ ID NO: 891 - RNA, 20 nt, Artificial Sequence
  Synthetic polynucleotide
gucuggaagaccugggguga

SEQ ID NO: 892 - RNA, 20 nt, Artificial Sequence
  Synthetic polynucleotide
ucuggaagaccuggggugag

SEQ ID NO: 893 - RNA, 20 nt, Artificial Sequence
  Synthetic polynucleotide
gcagggaucggcauccugau

SEQ ID NO: 894 - RNA, 20 nt, Artificial Sequence
  Synthetic polynucleotide
ugguccagggccgcagggau

SEQ ID NO: 895 - RNA, 20 nt, Artificial Sequence
  Synthetic polynucleotide
agggccgcagggaucggcau

SEQ ID NO: 896 - RNA, 20 nt, Artificial Sequence
  Synthetic polynucleotide
gcagggaucggcauccugau

SEQ ID NO: 897 - RNA, 20 nt, Artificial Sequence
  Synthetic polynucleotide
cacugcgugauccacaucaa

SEQ ID NO: 898 - RNA, 20 nt, Artificial Sequence
  Synthetic polynucleotide
uggaacaaugucccagguac

SEQ ID NO: 899 - RNA, 20 nt, Artificial Sequence
  Synthetic polynucleotide
ggaacaaugucccagguaca

SEQ ID NO: 900 - RNA, 20 nt, Artificial Sequence
  Synthetic polynucleotide
gaacaaugucccagguacag

SEQ ID NO: 901 - RNA, 20 nt, Artificial Sequence
  Synthetic polynucleotide
uggaacaaugucccagguac

SEQ ID NO: 902 - RNA, 20 nt, Artificial Sequence
  Synthetic polynucleotide
gucacacuuuucugcauccc

SEQ ID NO: 903 - RNA, 20 nt, Artificial Sequence
  Synthetic polynucleotide
ccuuggugaauuuuugaaac

SEQ ID NO: 904 - RNA, 20 nt, Artificial Sequence
  Synthetic polynucleotide
accgcagagaugauggacgu

SEQ ID NO: 905 - RNA, 20 nt, Artificial Sequence
  Synthetic polynucleotide
ccaaccaccgcagagaugau

SEQ ID NO: 906 - RNA, 20 nt, Artificial Sequence
  Synthetic polynucleotide
gccaaccaccgcagagauga

SEQ ID NO: 907 - RNA, 20 nt, Artificial Sequence
  Synthetic polynucleotide
aaugccaaccaccgcagaga

SEQ ID NO: 908 - RNA, 20 nt, Artificial Sequence
  Synthetic polynucleotide
agaaugccaaccaccgcaga

SEQ ID NO: 909 - RNA, 20 nt, Artificial Sequence
  Synthetic polynucleotide
ccgcagagaugauggacguc

SEQ ID NO: 910 - RNA, 20 nt, Artificial Sequence
  Synthetic polynucleotide
ugugacugugugggagcuga

SEQ ID NO: 911 - RNA, 20 nt, Artificial Sequence
  Synthetic polynucleotide
uuaggugugacuguguggga

SEQ ID NO: 912 - RNA, 20 nt, Artificial Sequence
  Synthetic polynucleotide
gugugggagcugaugacuuu

SEQ ID NO: 913 - RNA, 20 nt, Artificial Sequence
  Synthetic polynucleotide
uuuggggccaaaccuuacga

SEQ ID NO: 914 - RNA, 20 nt, Artificial Sequence
  Synthetic polynucleotide
uuggggccaaaccuuacgau

SEQ ID NO: 915 - RNA, 20 nt, Artificial Sequence
  Synthetic polynucleotide
uuuggggccaaaccuuacga

SEQ ID NO: 916 - RNA, 20 nt, Artificial Sequence
  Synthetic polynucleotide
cacacucaucagccagugca

SEQ ID NO: 917 - RNA, 20 nt, Artificial Sequence
  Synthetic polynucleotide
acacacucaucagccagugc

SEQ ID NO: 918 - RNA, 20 nt, Artificial Sequence
  Synthetic polynucleotide
uacacacucaucagccagug

SEQ ID NO: 919 - RNA, 20 nt, Artificial Sequence
  Synthetic polynucleotide
gacguacacacucaucagcc

SEQ ID NO: 920 - RNA, 20 nt, Artificial Sequence
  Synthetic polynucleotide
gacgacguacacacucauca

SEQ ID NO: 921 - RNA, 20 nt, Artificial Sequence
  Synthetic polynucleotide
gccucggagaaaaucuucua

SEQ ID NO: 922 - RNA, 20 nt, Artificial Sequence
  Synthetic polynucleotide
ccaggucaugcauucaagcu

SEQ ID NO: 923 - RNA, 20 nt, Artificial Sequence
  Synthetic polynucleotide
uccaggucaugcauucaagc

SEQ ID NO: 924 - RNA, 20 nt, Artificial Sequence
  Synthetic polynucleotide
gcauucaagcugggauguca

SEQ ID NO: 925 - RNA, 20 nt, Artificial Sequence
  Synthetic polynucleotide
uccaggucaugcauucaagc

SEQ ID NO: 926 - RNA, 20 nt, Artificial Sequence
  Synthetic polynucleotide
uccaggucaugcauucaagc

SEQ ID NO: 927 - RNA, 20 nt, Artificial Sequence
  Synthetic polynucleotide
caggucaugcauucaagcug

SEQ ID NO: 928 - RNA, 20 nt, Artificial Sequence
  Synthetic polynucleotide
ccaggucaugcauucaagcu

SEQ ID NO: 929 - RNA, 20 nt, Artificial Sequence
  Synthetic polynucleotide
uccaggucaugcauucaagc

SEQ ID NO: 930 - RNA, 20 nt, Artificial Sequence
  Synthetic polynucleotide
ggaaggagccauuauaucca

SEQ ID NO: 931 - RNA, 20 nt, Artificial Sequence
  Synthetic polynucleotide
gaaggagccauuauauccag

SEQ ID NO: 932 - RNA, 20 nt, Artificial Sequence
  Synthetic polynucleotide
gccauuauauccagggacuc

SEQ ID NO: 933 - RNA, 20 nt, Artificial Sequence
  Synthetic polynucleotide
uuaucacuauugaucugguu

SEQ ID NO: 934 - RNA, 20 nt, Artificial Sequence
  Synthetic polynucleotide
aauaauguuaucacuauuga

SEQ ID NO: 935 - RNA, 20 nt, Artificial Sequence
  Synthetic polynucleotide
ggaacccgcccaccacugcc

SEQ ID NO: 936 - RNA, 20 nt, Artificial Sequence
  Synthetic polynucleotide
accacugccaagcucacuau

SEQ ID NO: 937 - RNA, 20 nt, Artificial Sequence
  Synthetic polynucleotide
caauaggaccacagucacga

SEQ ID NO: 938 - RNA, 20 nt, Artificial Sequence
  Synthetic polynucleotide
gaccacagucacgacgauca

SEQ ID NO: 939 - RNA, 20 nt, Artificial Sequence
  Synthetic polynucleotide
cucaauaggaccacagucac

SEQ ID NO: 940 - RNA, 20 nt, Artificial Sequence
  Synthetic polynucleotide
aggaccacagucacgacgau

SEQ ID NO: 941 - RNA, 20 nt, Artificial Sequence
  Synthetic polynucleotide
gccacugucggcaucaugau

SEQ ID NO: 942 - RNA, 20 nt, Artificial Sequence
  Synthetic polynucleotide
ccacugucggcaucaugauu

SEQ ID NO: 943 - RNA, 20 nt, Artificial Sequence
  Synthetic polynucleotide
cacugucggcaucaugauug

SEQ ID NO: 944 - RNA, 20 nt, Artificial Sequence
  Synthetic polynucleotide
acugucggcaucaugauugg

SEQ ID NO: 945 - RNA, 20 nt, Artificial Sequence
  Synthetic polynucleotide
gcuggggccacugucggcau

SEQ ID NO: 946 - RNA, 20 nt, Artificial Sequence
  Synthetic polynucleotide
gccacugucggcaucaugau

SEQ ID NO: 947 - RNA, 20 nt, Artificial Sequence
  Synthetic polynucleotide
gccacugucggcaucaugau

SEQ ID NO: 948 - RNA, 20 nt, Artificial Sequence
  Synthetic polynucleotide
acuccaaucaugaugccgac

SEQ ID NO: 949 - RNA, 20 nt, Artificial Sequence
  Synthetic polynucleotide
cacuccaaucaugaugccga

SEQ ID NO: 950 - RNA, 20 nt, Artificial Sequence
  Synthetic polynucleotide
cagcacuccaaucaugaugc

SEQ ID NO: 951 - RNA, 20 nt, Artificial Sequence
  Synthetic polynucleotide
cccaaccagcacuccaauca

SEQ ID NO: 952 - RNA, 20 nt, Artificial Sequence
  Synthetic polynucleotide
agcacuccaaucaugaugcc

SEQ ID NO: 953 - RNA, 20 nt, Artificial Sequence
  Synthetic polynucleotide
accccaaccagcacuccaau

SEQ ID NO: 954 - RNA, 20 nt, Artificial Sequence
  Synthetic polynucleotide
ugguucauuuucugcuccuc

SEQ ID NO: 955 - RNA, 20 nt, Artificial Sequence
  Synthetic polynucleotide
gcaggugacaaggacauagg

SEQ ID NO: 956 - RNA, 20 nt, Artificial Sequence
  Synthetic polynucleotide
ggcaggugacaaggacauag

SEQ ID NO: 957 - RNA, 20 nt, Artificial Sequence
  Synthetic polynucleotide
aggcaggugacaaggacaua

SEQ ID NO: 958 - RNA, 20 nt, Artificial Sequence
  Synthetic polynucleotide
uaggcaggugacaaggacau

SEQ ID NO: 959 - RNA, 20 nt, Artificial Sequence
  Synthetic polynucleotide
cuaggcaggugacaaggaca

SEQ ID NO: 960 - RNA, 20 nt, Artificial Sequence
  Synthetic polynucleotide
gagaccuaggcaggugacaa

SEQ ID NO: 961 - RNA, 20 nt, Artificial Sequence
  Synthetic polynucleotide
agagaccuaggcaggugaca

SEQ ID NO: 962 - RNA, 20 nt, Artificial Sequence
  Synthetic polynucleotide
uaggcaggugacaaggacau

SEQ ID NO: 963 - RNA, 20 nt, Artificial Sequence
  Synthetic polynucleotide
gcaggugacaaggauguaca

SEQ ID NO: 964 - RNA, 20 nt, Artificial Sequence
  Synthetic polynucleotide
ggcaggugacaaggauguac

SEQ ID NO: 965 - RNA, 20 nt, Artificial Sequence
  Synthetic polynucleotide
gaggcccaggcaggugacaa

SEQ ID NO: 966 - RNA, 20 nt, Artificial Sequence
  Synthetic polynucleotide
agaggcccaggcaggugaca

SEQ ID NO: 967 - RNA, 20 nt, Artificial Sequence
  Synthetic polynucleotide
caggcaggugacaaggaugu

SEQ ID NO: 968 - RNA, 20 nt, Artificial Sequence
  Synthetic polynucleotide
gagaggcccaggcaggugac

SEQ ID NO: 969 - RNA, 20 nt, Artificial Sequence
  Synthetic polynucleotide
gcagguggcaaagauguaca

SEQ ID NO: 970 - RNA, 20 nt, Artificial Sequence
  Synthetic polynucleotide
ggcagguggcaaagauguac

SEQ ID NO: 971 - RNA, 20 nt, Artificial Sequence
  Synthetic polynucleotide
gaggcccaggcagguggcaa

SEQ ID NO: 972 - RNA, 20 nt, Artificial Sequence
  Synthetic polynucleotide
agaggcccaggcagguggca

SEQ ID NO: 973 - RNA, 20 nt, Artificial Sequence
  Synthetic polynucleotide
caggcagguggcaaagaugu

SEQ ID NO: 974 - RNA, 20 nt, Artificial Sequence
  Synthetic polynucleotide
gagaggcccaggcagguggc

SEQ ID NO: 975 - RNA, 20 nt, Artificial Sequence
  Synthetic polynucleotide
caggcaggugacaagggugu

SEQ ID NO: 976 - RNA, 20 nt, Artificial Sequence
  Synthetic polynucleotide
ccaggcaggugacaagggug

SEQ ID NO: 977 - RNA, 20 nt, Artificial Sequence
  Synthetic polynucleotide
aggcccaggcaggugacaag

SEQ ID NO: 978 - RNA, 20 nt, Artificial Sequence
  Synthetic polynucleotide
aaggcccaggcaggugacaa

SEQ ID NO: 979 - RNA, 20 nt, Artificial Sequence
  Synthetic polynucleotide
aaaggcccaggcaggugaca

SEQ ID NO: 980 - RNA, 20 nt, Artificial Sequence
  Synthetic polynucleotide
gaaaggcccaggcaggugac

SEQ ID NO: 981 - RNA, 20 nt, Artificial Sequence
  Synthetic polynucleotide
cccaggcaggugacaagggu

SEQ ID NO: 982 - RNA, 20 nt, Artificial Sequence
  Synthetic polynucleotide
caggcaggugacaagggugu

SEQ ID NO: 983 - RNA, 20 nt, Artificial Sequence
  Synthetic polynucleotide
aaggcccaggcaggugacaa

SEQ ID NO: 984 - RNA, 20 nt, Artificial Sequence
  Synthetic polynucleotide
cuggggacaggaugucaccu

SEQ ID NO: 985 - RNA, 20 nt, Artificial Sequence
  Synthetic polynucleotide
accuggggacaggaugucac

SEQ ID NO: 986 - RNA, 20 nt, Artificial Sequence
  Synthetic polynucleotide
gucccucaccccaggucuuc

SEQ ID NO: 987 - RNA, 20 nt, Artificial Sequence
  Synthetic polynucleotide
agaagggagucccucacccc

SEQ ID NO: 988 - RNA, 20 nt, Artificial Sequence
  Synthetic polynucleotide
ugucuggaagaccuggggug

SEQ ID NO: 989 - RNA, 20 nt, Artificial Sequence
  Synthetic polynucleotide
gucuggaagaccugggguga

SEQ ID NO: 990 - RNA, 20 nt, Artificial Sequence
  Synthetic polynucleotide
augucuggaagaccuggggu

SEQ ID NO: 991 - RNA, 20 nt, Artificial Sequence
  Synthetic polynucleotide
gagaagggagucccucaccc

SEQ ID NO: 992 - RNA, 20 nt, Artificial Sequence
  Synthetic polynucleotide
uuggccugaaguuuuuggaa

SEQ ID NO: 993 - RNA, 20 nt, Artificial Sequence
  Synthetic polynucleotide
aguauuggccugaaguuuuu

SEQ ID NO: 994 - RNA, 20 nt, Artificial Sequence
  Synthetic polynucleotide
caguauuggccugaaguuuu

SEQ ID NO: 995 - RNA, 20 nt, Artificial Sequence
  Synthetic polynucleotide
caguauuggccugaaguuuu

SEQ ID NO: 996 - RNA, 20 nt, Artificial Sequence
  Synthetic polynucleotide
cuuuucauuccaaaaacuuc

SEQ ID NO: 997 - RNA, 20 nt, Artificial Sequence
  Synthetic polynucleotide
aacuugccaguauuggccug

SEQ ID NO: 998 - RNA, 20 nt, Artificial Sequence
  Synthetic polynucleotide
gcuuuucauuccaaaaacuu

SEQ ID NO: 999 - RNA, 20 nt, Artificial Sequence
  Synthetic polynucleotide
acucauucugcuugaaauaa

SEQ ID NO: 1000 - RNA, 20 nt, Artificial Sequence
  Synthetic polynucleotide
gcacucauucugcuugaaau

SEQ ID NO: 1001 - RNA, 20 nt, Artificial Sequence
  Synthetic polynucleotide
uuaggagcacucauucugcu

SEQ ID NO: 1002 - RNA, 20 nt, Artificial Sequence
  Synthetic polynucleotide
gcacucauucugcuugaaau

SEQ ID NO: 1003 - RNA, 20 nt, Artificial Sequence
  Synthetic polynucleotide
uuaggagcacucauucugcu

SEQ ID NO: 1004 - RNA, 20 nt, Artificial Sequence
  Synthetic polynucleotide
cacucauucugcuugaaaua

SEQ ID NO: 1005 - RNA, 20 nt, Artificial Sequence
  Synthetic polynucleotide
acucuuauuucaagcagaau

SEQ ID NO: 1006 - RNA, 20 nt, Artificial Sequence
  Synthetic polynucleotide
cuguaagacagaaaaccaca

SEQ ID NO: 1007 - RNA, 20 nt, Artificial Sequence
  Synthetic polynucleotide
caaguccaacaaacaacugu

SEQ ID NO: 1008 - RNA, 20 nt, Artificial Sequence
  Synthetic polynucleotide
ucugucuuacaguuguuugu

SEQ ID NO: 1009 - RNA, 20 nt, Artificial Sequence
  Synthetic polynucleotide
auggcuccggagccucugcc

SEQ ID NO: 1010 - RNA, 20 nt, Artificial Sequence
  Synthetic polynucleotide
gccuucggccugcauggcuc

SEQ ID NO: 1011 - RNA, 20 nt, Artificial Sequence
  Synthetic polynucleotide
ccuucggccugcauggcucc

SEQ ID NO: 1012 - RNA, 20 nt, Artificial Sequence
  Synthetic polynucleotide
cagaggcuccggagccaugc

SEQ ID NO: 1013 - RNA, 20 nt, Artificial Sequence
  Synthetic polynucleotide
gcagaggcuccggagccaug

SEQ ID NO: 1014 - RNA, 20 nt, Artificial Sequence
  Synthetic polynucleotide
gccuucggccugcauggcuc

SEQ ID NO: 1015 - RNA, 20 nt, Artificial Sequence
  Synthetic polynucleotide
accuaauaauguaucucuaa

SEQ ID NO: 1016 - RNA, 20 nt, Artificial Sequence
  Synthetic polynucleotide
accuaauaauguaucucuaa

SEQ ID NO: 1017 - RNA, 20 nt, Artificial Sequence
  Synthetic polynucleotide
caccuaauaauguaucucua

SEQ ID NO: 1018 - RNA, 20 nt, Artificial Sequence
  Synthetic polynucleotide
uuagagauacauuauuaggu

SEQ ID NO: 1019 - RNA, 20 nt, Artificial Sequence
  Synthetic polynucleotide
guuagagauacauuauuagg

SEQ ID NO: 1020 - RNA, 20 nt, Artificial Sequence
  Synthetic polynucleotide
guccugguccugaaacaauu

SEQ ID NO: 1021 - RNA, 20 nt, Artificial Sequence
  Synthetic polynucleotide
cguccugguccugaaacaau

SEQ ID NO: 1022 - RNA, 20 nt, Artificial Sequence
  Synthetic polynucleotide
uuucccaauuguuucaggac

SEQ ID NO: 1023 - RNA, 20 nt, Artificial Sequence
  Synthetic polynucleotide
uucccaauuguuucaggacc

SEQ ID NO: 1024 - RNA, 20 nt, Artificial Sequence
  Synthetic polynucleotide
ggcagcugaagggauuaaag

SEQ ID NO: 1025 - RNA, 20 nt, Artificial Sequence
  Synthetic polynucleotide
aaggcagcugaagggauuaa

SEQ ID NO: 1026 - RNA, 20 nt, Artificial Sequence
  Synthetic polynucleotide
aaaggcagcugaagggauua

SEQ ID NO: 1027 - RNA, 20 nt, Artificial Sequence
  Synthetic polynucleotide
gcagcugaagggauuaaagc

SEQ ID NO: 1028 - RNA, 20 nt, Artificial Sequence
  Synthetic polynucleotide
gacugccgcuuuaaucccuu

SEQ ID NO: 1029 - RNA, 20 nt, Artificial Sequence
  Synthetic polynucleotide
cugccgcuuuaaucccuuca

SEQ ID NO: 1030 - RNA, 20 nt, Artificial Sequence
  Synthetic polynucleotide
cucuagaaaaaucaaaacaa

SEQ ID NO: 1031 - RNA, 20 nt, Artificial Sequence
  Synthetic polynucleotide
gaacauaaaaagcauucguc

SEQ ID NO: 1032 - RNA, 20 nt, Artificial Sequence
  Synthetic polynucleotide
cuggaagagaaaggggggaa

SEQ ID NO: 1033 - RNA, 20 nt, Artificial Sequence
  Synthetic polynucleotide
gcuucuggaagagaaagggg

SEQ ID NO: 1034 - RNA, 20 nt, Artificial Sequence
  Synthetic polynucleotide
ggcuucuggaagagaaaggg

SEQ ID NO: 1035 - RNA, 20 nt, Artificial Sequence
  Synthetic polynucleotide
gggcuucuggaagagaaagg

SEQ ID NO: 1036 - RNA, 20 nt, Artificial Sequence
  Synthetic polynucleotide
agggcuucuggaagagaaag

SEQ ID NO: 1037 - RNA, 20 nt, Artificial Sequence
  Synthetic polynucleotide
aagggcuucuggaagagaaa

SEQ ID NO: 1038 - RNA, 20 nt, Artificial Sequence
  Synthetic polynucleotide
gaagggcuucuggaagagaa

SEQ ID NO: 1039 - RNA, 20 nt, Artificial Sequence
  Synthetic polynucleotide
ugaagggcuucuggaagaga

SEQ ID NO: 1040 - RNA, 20 nt, Artificial Sequence
  Synthetic polynucleotide
ucuggaagagaaagggggga

SEQ ID NO: 1041 - RNA, 20 nt, Artificial Sequence
  Synthetic polynucleotide
agggcuucuggaagagaaag

SEQ ID NO: 1042 - RNA, 20 nt, Artificial Sequence
  Synthetic polynucleotide
aagggcuucuggaagagaaa

SEQ ID NO: 1043 - RNA, 20 nt, Artificial Sequence
  Synthetic polynucleotide
gaagggcuucuggaagagaa

SEQ ID NO: 1044 - RNA, 20 nt, Artificial Sequence
  Synthetic polynucleotide
uuccccccuuucucuuccag

SEQ ID NO: 1045 - RNA, 20 nt, Artificial Sequence
  Synthetic polynucleotide
cuguuccccccuuucucuuc

SEQ ID NO: 1046 - RNA, 20 nt, Artificial Sequence
  Synthetic polynucleotide
gcuuuucaccugagaagaaa

SEQ ID NO: 1047 - RNA, 20 nt, Artificial Sequence
  Synthetic polynucleotide
agcuuuucaccugagaagaa

SEQ ID NO: 1048 - RNA, 20 nt, Artificial Sequence
  Synthetic polynucleotide
gagcuuuucaccugagaaga

SEQ ID NO: 1049 - RNA, 20 nt, Artificial Sequence
  Synthetic polynucleotide
uucaccugagaagaaaggaa

SEQ ID NO: 1050 - RNA, 20 nt, Artificial Sequence
  Synthetic polynucleotide
ccggagcuuuucaccugaga

SEQ ID NO: 1051 - RNA, 20 nt, Artificial Sequence
  Synthetic polynucleotide
cccggagcuuuucaccugag

SEQ ID NO: 1052 - RNA, 20 nt, Artificial Sequence
  Synthetic polynucleotide
acccggagcuuuucaccuga

SEQ ID NO: 1053 - RNA, 20 nt, Artificial Sequence
  Synthetic polynucleotide
caccugagaagaaaggaacc

SEQ ID NO: 1054 - RNA, 20 nt, Artificial Sequence
  Synthetic polynucleotide
gauuugguuccuuucuucuc

SEQ ID NO: 1055 - RNA, 20 nt, Artificial Sequence
  Synthetic polynucleotide
uuccuuucuucucaggugaa

SEQ ID NO: 1056 - RNA, 20 nt, Artificial Sequence
  Synthetic polynucleotide
ugauuugguuccuuucuucu

SEQ ID NO: 1057 - protein, 1129 aa, Alicyclobacillus acidoterrestris
MAVKSIKVKLRLDDMPEIRAGLWKLHKEVNAGVRYYTEWLSLLRQENLYRRSPNGDGEQECDKTAEECKAELLERLRARQVENGHRGPAGSDDELLQLARQLYELLVPQAIGAKGDAQQIARKFLSPLADKDAVGGLGIAKAGNKPRWVRMREAGEPGWEEEKEKAETRKSADRTADVLRALADFGLKPLMRVYTDSEMSSVEWKPLRKGQAVRTWDRDMFQQAIERMMSWESWNQRVGQEYAKLVEQKNRFEQKNFVGQEHLVHLVNQLQQDMKEASPGLESKEQTAHYVTGRALRGSDKVFEKWGKLAPDAPFDLYDAEIKNVQRRNTRRFGSHDLFAKLAEPEYQALWREDASFLTRYAVYNSILRKLNHAKMFATFTLPDATAHPIWTRFDKLGGNLHQYTFLFNEFGERRHAIRFHKLLKVENGVAREVDDVTVPISMSEQLDNLLPRDPNEPIALYFRDYGAEQHFTGEFGGAKIQCRRDQLAHMHRRRGARDVYLNVSVRVQSQSEARGERRPPYAAVFRLVGDNHRAFVHFDKLSDYLAEHPDDGKLGSEGLLSGLRVMSVDLGLRTSASISVFRVARKDELKPNSKGRVPFFFPIKGNDNLVAVHERSQLLKLPGETESKDLRAIREERQRTLRQLRTQLAYLRLLVRCGSEDVGRRERSWAKLIEQPVDAANHMTPDWREAFENELQKLKSLHGICSDKEWMDAVYESVRRVWRHMGKQVRDWRKDVRSGERPKIRGYAKDVVGGNSIEQIEYLERQYKFLKSWSFFGKVSGQVIRAEKGSRFAITLREHIDHAKEDRLKKLADRIIMEALGYVYALDERGKGKWVAKYPPCQLILLEELSEYQFNNDRPPSENNQLMQWSHRGVFQELINQAQVHDLLVGTMYAAFSSRFDARTGAPGIRCRRVPARCTQEHNPEPFPWWLNKFVVEHTLDACPLRADDLIPTGEGEIFVSPFSAEEGDFHQIHADLNAAQNLQQRLWSDFDISQIRLRCDWGEVDGELVLIPRLTGKRTADSYSNKVFYTNTGVTYYERERGKKRRKVFAQEKLSEEEAELLVEADEAREKSVVLMRDPSGIINRGNWTRQKEFWSMVNQRIEGYLVKQIRSRVPLQDSACENTGDI

SEQ ID NO: 1058 - protein, 1389 aa, Leptotrichia shahii
MGNLFGHKRWYEVRDKKDFKIKRKVKVKRNYDGNKYILNINENNNKEKIDNNKFIRKYINYKKNDNILKEFTRKFHAGNILFKLKGKEGIIRIENNDDFLETEEVVLYIEAYGKSEKLKALGITKKKIIDEAIRQGITKDDKKIEIKRQENEEEIEIDIRDEYTNKTLNDCSIILRIIENDELETKKSIYEIFKNINMSLYKIIEKIIENETEKVFENRYYEEHLREKLLKDDKIDVILTNFMEIREKIKSNLEILGFVKFYLNVGGDKKKSKNKKMLVEKILNINVDLTVEDIADFVIKELEFWNITKRIEKVKKVNNEFLEKRRNRTYIKSYVLLDKHEKFKIERENKKDKIVKFFVENIKNNSIKEKIEKILAEFKIDELIKKLEKELKKGNCDTEIFGIFKKHYKVNFDSKKFSKKSDEEKELYKIIYRYLKGRIEKILVNEQKVRLKKMEKIEIEKILNESILSEKILKRVKQYTLEHIMYLGKLRHNDIDMTTVNTDDFSRLHAKEELDLELITFFASTNMELNKIFSRENINNDENIDFFGGDREKNYVLDKKILNSKIKIIRDLDFIDNKNNITNNFIRKFTKIGTNERNRILHAISKERDLQGTQDDYNKVINIIQNLKISDEEVSKALNLDVVFKDKKNIITKINDIKISEENNNDIKYLPSFSKVLPEILNLYRNNPKNEPFDTIETEKIVLNALIYVNKELYKKLILEDDLEENESKNIFLQELKKTLGNIDEIDENIIENYYKNAQISASKGNNKAIKKYQKKVIECYIGYLRKNYEELFDFSDFKMNIQEIKKQIKDINDNKTYERITVKTSDKTIVINDDFEYIISIFALLNSNAVINKIRNRFFATSVWLNTSEYQNIIDILDEIMQLNTLRNECITENWNLNLEEFIQKMKEIEKDFDDFKIQTKKEIFNNYYEDIKNNILTEFKDDINGCDVLEKKLEKIVIFDDETKFEIDKKSNILQDEQRKLSNINKKDLKKKVDQYIKDKDQEIKSKILCRIIFNSDFLKKYKKEIDNLIEDMESENENKFQEIYYPKERKNELYIYKKNLFLNIGNPNFDKIYGLISNDIKMADAKFLFNIDGKNIRKNKISEIDAILKNLNDKLNGYSKEYKEKYIKKLKENDDFFAKNIQNKNYKSFEKDYNRVSEYKKIRDLVEFNYLNKIESYLIDINWKLAIQMARFERDMHYIVNGLRELGIIKLSGYNTGISRAYPKRNGSDGFYTTTAYYKFFDEESYKKFEKICYGFGIDLSENSEINKPENESIRNYISHFYIVRNPFADYSIAEQIDRVSNLLSYSTRYNNSTYASVFEVFKKDVNLDYDELKKKFKLIGNNDILERLMKPKKVSVLELESYNSDYIKNLIIELLTKIENTNDTL

SEQ ID NO: 1059 - protein, 1050 aa, Artificial Sequence
  Synthetic polypeptide
MRSNYHGGRNARQWRKQISGLARRTKETVFTYKFPLETDAAEIDFDKAVQTYGIAEGVGHGSLIGLVCAFHLSGFRLFSKAGEAMAFRNRSRYPTDAFAEKLSAIMGIQLPTLSPEGLDLIFQSPPRSRDGIAPVWSENEVRNRLYTNWTGRGPANKPDEHLLEIAGEIAKQVFPKFGGWDDLASDPDKALAAADKYFQSQGDFPSIASLPAAIMLSPANSTVDFEGDYIAIDPAAETLLHQAVSRCAARLGRERPDLDQNKGPFVSSLQDALVSSQNNGLSWLFGVGFQHWKEKSPKELIDEYKVPADQHGAVTQVKSFVDAIPLNPLFDTTHYGEFRASVAGKVRSWVANYWKRLLDLKSLLATTEFTLPESISDPKAVSLFSGLLVDPQGLKKVADSLPARLVSAEEAIDRLMGVGIPTAADIAQVERVADEIGAFIGQVQQFNNQVKQKLENLQDADDEEFLKGLKIELPSGDKEPPAINRISGGAPDAAAEISELEEKLQRLLDARSEHFQTISEWAEENAVTLDPIAAMVELERLRLAERGATGDPEEYALRLLLQRIGRLANRVSPVSAGSIRELLKPVFMEEREFNLFFHNRLGSLYRSPYSTSRHQPFSIDVGKAKAIDWIAGLDQISSDIEKALSGAGEALGDQLRDWINLAGFAISQRLRGLPDTVPNALAQVRCPDDVRIPPLLAMLLEEDDIARDVCLKAFNLYVSAINGCLFGALREGFIVRTRFQRIGTDQIHYVPKDKAWEYPDRLNTAKGPINAAVSSDWIEKDGAVIKPVETVRNLSSTGFAGAGVSEYLVQAPHDWYTPLDLRDVAHLVTGLPVEKNITKLKRLTNRTAFRMVGASSFKTHLDSVLLSDKIKLGDFTIIIDQHYRQSVTYGGKVKISYEPERLQVEAAVPVVDTRDRTVPEPDTLFDHIVAIDLGERSVGFAVFDIKSCLRTGEVKPIHDNNGNPVVGTVAVPSIRRLMKAVRSHRRRRQPNQKVNQTYSTALQNYRENVIGDVCNRIDTLMERYNAFPVLEFQIKNFQAGAKQLEIVYGS

SEQ ID NO: 1060 - protein, 1307 aa, Artificial Sequence
  Synthetic polypeptide
TQFEGFTNLYQVSKTLRFELIPQGKTLKHIQEQGFIEEDKARNDHYKELKPIIDRIYKTYADQCLQLVQLDWENLSAAIDSYRKEKTEETRNALIEEQATYRNAIHDYFIGRTDNLTDAINKRHAEIYKGLFKAELFNGKVLKQLGTVTTTEHENALLRSFDKFTTYFSGFYENRKNVFSAEDISTAIPHRIVQDNFPKFKENCHIFTRLITAVPSLREHFENVKKAIGIFVSTSIEEVFSFPFYNQLLTQTQIDLYNQLLGGISREAGTEKIKGLNEVLNLAIQKNDETAHIIASLPHRFIPLFKQILSDRNTLSFILEEFKSDEEVIQSFCKYKTLLRNENVLETAEALFNELNSIDLTHIFISHKKLETISSALCDHWDTLRNALYERRISELTGKITKSAKEKVQRSLKHEDINLQEIISAAGKELSEAFKQKTSEILSHAHAALDQPLPTTMLKKQEEKEILKSQLDSLLGLYHLLDWFAVDESNEVDPEFSARLTGIKLEMEPSLSFYNKARNYATKKPYSVEKFKLNFQMPTLASGWDVNKEKNNGAILFVKNGLYYLGIMPKQKGRYKALSFEPTEKTSEGFDKMYYDYFPDAAKMIPKCSTQLKAVTAHFQTHTTPILLSNNFIEPLEITKEIYDLNNPEKEPKKFQTAYAKKTGDQKGYREALCKWIDFTRDFLSKYTKTTSIDLSSLRPSSQYKDLGEYYAELNPLLYHISFQRIAEKEIMDAVETGKLYLFQIYNKDFAKGHHGKPNLHTLYWTGLFSPENLAKTSIKLNGQAELFYRPKSRMKRMAHRLGEKMLNKKLKDQKTPIPDTLYQELYDYVNHRLSHDLSDEARALLPNVITKEVSHEIIKDRRFTSDKFFFHVPITLNYQAANSPSKFNQRVNAYLKEHPETPIIGIDRGERNLIYITVIDSTGKILEQRSLNTIQQFDYQKKLDNREKERVAARQAWSVVGTIKDLKQGYLSQVIHEIVDLMIHYQAVVVLENLNFGFKSKRTGIAEKAVYQQFEKMLIDKLNCLVLKDYPAEKVGGVLNPYQLTDQFTSFAKMGTQSGFLFYVPAPYTSKIDPLTGFVDPFVWKTIKNHESRKHFLEGFDFLHYDVKTGDFILHFKMNRNLSFQRGLPGFMPAWDIVFEKNETQFDAKGTPFIAGKRIVPVIENHRFTGRYRDLYPANELIALLEEKGIVFRDGSNILPKLLENDDSHAIDTMVALIRSVLQMRNSNAATGEDYINSPVRDLNGVCFDSRFQNPEWPMDADANGAYHIALKGQLLLNHLKESKDLKLQNGISNQDWLAYIQELRN

SEQ ID NO: 1061 - protein, 1307 aa, Artificial Sequence
  Synthetic polypeptide
TQFEGFTNLYQVSKTLRFELIPQGKTLKHIQEQGFIEEDKARNDHYKELKPIIDRIYKTYADQCLQLVQLDWENLSAAIDSYRKEKTEETRNALIEEQATYRNAIHDYFIGRTDNLTDAINKRHAEIYKGLFKAELFNGKVLKQLGTVTTTEHENALLRSFDKFTTYFSGFYENRKNVFSAEDISTAIPHRIVQDNFPKFKENCHIFTRLITAVPSLREHFENVKKAIGIFVSTSIEEVFSFPFYNQLLTQTQIDLYNQLLGGISREAGTEKIKGLNEVLNLAIQKNDETAHIIASLPHRFIPLFKQILSDRNTLSFILEEFKSDEEVIQSFCKYKTLLRNENVLETAEALFNELNSIDLTHIFISHKKLETISSALCDHWDTLRNALYERRISELTGKITKSAKEKVQRSLKHEDINLQEIISAAGKELSEAFKQKTSEILSHAHAALDQPLPTTMLKKQEEKEILKSQLDSLLGLYHLLDWFAVDESNEVDPEFSARLTGIKLEMEPSLSFYNKARNYATKKPYSVEKFKLNFQMPTLASGWDVNKEKNNGAILFVKNGLYYLGIMPKQKGRYKALSFEPTEKTSEGFDKMYYDYFPDAAKMIPKCSTQLKAVTAHFQTHTTPILLSNNFIEPLEITKEIYDLNNPEKEPKKFQTAYAKKTGDQKGYREALCKWIDFTRDFLSKYTKTTSIDLSSLRPSSQYKDLGEYYAELNPLLYHISFQRIAEKEIMDAVETGKLYLFQIYNKDFAKGHHGKPNLHTLYWTGLFSPENLAKTSIKLNGQAELFYRPKSRMKRMAHRLGEKMLNKKLKDQKTPIPDTLYQELYDYVNHRLSHDLSDEARALLPNVITKEVSHEIIKDRRFTSDKFFFHVPITLNYQAANSPSKFNQRVNAYLKEHPETPIIGIDRGEANLIYITVIDSTGKILEQRSLNTIQQFDYQKKLDNREKERVAARQAWSVVGTIKDLKQGYLSQVIHEIVDLMIHYQAVVVLENLNFGFKSKRTGIAEKAVYQQFEKMLIDKLNCLVLKDYPAEKVGGVLNPYQLTDQFTSFAKMGTQSGFLFYVPAPYTSKIDPLTGFVDPFVWKTIKNHESRKHFLEGFDFLHYDVKTGDFILHFKMNRNLSFQRGLPGFMPAWDIVFEKNETQFDAKGTPFIAGKRIVPVIENHRFTGRYRDLYPANELIALLEEKGIVFRDGSNILPKLLENDDSHAIDTMVALIRSVLQMRNSNAATGEDYINSPVRDLNGVCFDSRFQNPEWPMDADANGAYHIALKGQLLLNHLKESKDLKLQNGISNQDWLAYIQELRN

SEQ ID NO: 1062 - protein, 1228 aa, Lachnospiraceae species
MSKLEKFTNCYSLSKTLRFKAIPVGKTQENIDNKRLLVEDEKRAEDYKGVKKLLDRYYLSFINDVLHSIKLKNLNNYISLFRKKTRTEKENKELENLEINLRKEIAKAFKGNEGYKSLFKKDIIETILPEFLDDKDEIALVNSFNGFTTAFTGFFDNRENMFSEEAKSTSIAFRCINENLTRYISNMDIFEKVDAIFDKHEVQEIKEKILNSDYDVEDFFEGEFFNFVLTQEGIDVYNAIIGGFVTESGEKIKGLNEYINLYNQKTKQKLPKFKPLYKQVLSDRESLSFYGEGYTSDEEVLEVFRNTLNKNSEIFSSIKKLEKLFKNFDEYSSAGIFVKNGPAISTISKDIFGEWNVIRDKWNAEYDDIHLKKKAVVTEKYEDDRRKSFKKIGSFSLEQLQEYADADLSVVEKLKEIIIQKVDEIYKVYGSSEKLFDADFVLEKSLKKNDAVVAIMKDLLDSVKSFENYIKAFFGEGKETNRDESFYGDFVLAYDILLKVDHIYDAIRNYVTQKPYSKDKFKLYFQNPQFMGGWDKDKETDYRATILRYGSKYYLAIMDKKYAKCLQKIDKDDVNGNYEKINYKLLPGPNKMLPKVFFSKKWMAYYNPSEDIQKIYKNGTFKKGDMFNLNDCHKLIDFFKDSISRYPKWSNAYDFNFSETEKYKDIAGFYREVEEQGYKVSFESASKKEVDKLVEEGKLYMFQIYNKDFSDKSHGTPNLHTMYFKLLFDENNHGQIRLSGGAELFMRRASLKKEELVVHPANSPIANKNPDNPKKTTTLSYDVYKDKRFSEDQYELHIPIAINKCPKNIFKINTEVRVLLKHDDNPYVIGIDRGERNLLYIVVVDGKGNIVEQYSLNEIINNFNGIRIKTDYHSLLDKKEKERFEARQNWTSIENIKELKAGYISQVVHKICELVEKYDAVIALEDLNSGFKNSRVKVEKQVYQKFEKMLIDKLNYMVDKKSNPCATGGALKGYQITNKFESFKSMSTQNGFIFYIPAWLTSKIDPSTGFVNLLKTKYTSIADSKKFISSFDRIMYVPEEDLFEFALDYKNFSRTDADYIKKWKLYSYGNRIRIFRNPKKNNVFDWEEVCLTSAYKELFNKYGINYQQGDIRALLCEQSDKAFYSSFMALMSLMLQMRNSITGRTDVDFLISPVKNSDGIFYDSRNYEAQENAILPKNADANGAYNIARKVLWAIGQFKKAEDEKLDKVKIAISNKEWLEYAQTSVKH

SEQ ID NO: 1063 - protein, 1228 aa, Artificial Sequence
  Synthetic polypeptide
MSKLEKFTNCYSLSKTLRFKAIPVGKTQENIDNKRLLVEDEKRAEDYKGVKKLLDRYYLSFINDVLHSIKLKNLNNYISLFRKKTRTEKENKELENLEINLRKEIAKAFKGNEGYKSLFKKDIIETILPEFLDDKDEIALVNSFNGFTTAFTGFFDNRENMFSEEAKSTSIAFRCINENLTRYISNMDIFEKVDAIFDKHEVQEIKEKILNSDYDVEDFFEGEFFNFVLTQEGIDVYNAIIGGFVTESGEKIKGLNEYINLYNQKTKQKLPKFKPLYKQVLSDRESLSFYGEGYTSDEEVLEVFRNTLNKNSEIFSSIKKLEKLFKNFDEYSSAGIFVKNGPAISTISKDIFGEWNVIRDKWNAEYDDIHLKKKAVVTEKYEDDRRKSFKKIGSFSLEQLQEYADADLSVVEKLKEIIIQKVDEIYKVYGSSEKLFDADFVLEKSLKKNDAVVAIMKDLLDSVKSFENYIKAFFGEGKETNRDESFYGDFVLAYDILLKVDHIYDAIRNYVTQKPYSKDKFKLYFQNPQFMGGWDKDKETDYRATILRYGSKYYLAIMDKKYAKCLQKIDKDDVNGNYEKINYKLLPGPNKMLPKVFFSKKWMAYYNPSEDIQKIYKNGTFKKGDMFNLNDCHKLIDFFKDSISRYPKWSNAYDFNFSETEKYKDIAGFYREVEEQGYKVSFESASKKEVDKLVEEGKLYMFQIYNKDFSDKSHGTPNLHTMYFKLLFDENNHGQIRLSGGAELFMRRASLKKEELVVHPANSPIANKNPDNPKKTTTLSYDVYKDKRFSEDQYELHIPIAINKCPKNIFKINTEVRVLLKHDDNPYVIGIDRGEANLLYIVVVDGKGNIVEQYSLNEIINNFNGIRIKTDYHSLLDKKEKERFEARQNWTSIENIKELKAGYISQVVHKICELVEKYDAVIALEDLNSGFKNSRVKVEKQVYQKFEKMLIDKLNYMVDKKSNPCATGGALKGYQITNKFESFKSMSTQNGFIFYIPAWLTSKIDPSTGFVNLLKTKYTSIADSKKFISSFDRIMYVPEEDLFEFALDYKNFSRTDADYIKKWKLYSYGNRIRIFRNPKKNNVFDWEEVCLTSAYKELFNKYGINYQQGDIRALLCEQSDKAFYSSFMALMSLMLQMRNSITGRTDVDFLISPVKNSDGIFYDSRNYEAQENAILPKNADANGAYNIARKVLWAIGQFKKAEDEKLDKVKIAISNKEWLEYAQTSVKH

SEQ ID NO: 1064 - protein, 1228 aa, Artificial Sequence
  Synthetic polypeptide
MSKLEKFTNCYSLSKTLRFKAIPVGKTQENIDNKRLLVEDEKRAEDYKGVKKLLDRYYLSFINDVLHSIKLKNLNNYISLFRKKTRTEKENKELENLEINLRKEIAKAFKGNEGYKSLFKKDIIETILPEFLDDKDEIALVNSFNGFTTAFTGFFDNRENMFSEEAKSTSIAFRCINENLTRYISNMDIFEKVDAIFDKHEVQEIKEKILNSDYDVEDFFEGEFFNFVLTQEGIDVYNAIIGGFVTESGEKIKGLNEYINLYNQKTKQKLPKFKPLYKQVLSDRESLSFYGEGYTSDEEVLEVFRNTLNKNSEIFSSIKKLEKLFKNFDEYSSAGIFVKNGPAISTISKDIFGEWNVIRDKWNAEYDDIHLKKKAVVTEKYEDDRRKSFKKIGSFSLEQLQEYADADLSVVEKLKEIIIQKVDEIYKVYGSSEKLFDADFVLEKSLKKNDAVVAIMKDLLDSVKSFENYIKAFFGEGKETNRDESFYGDFVLAYDILLKVDHIYDAIRNYVTQKPYSKDKFKLYFQNPQFMGGWDKDKETDYRATILRYGSKYYLAIMDKKYAKCLQKIDKDDVNGNYEKINYKLLPGPNKMLPKVFFSKKWMAYYNPSEDIQKIYKNGTFKKGDMFNLNDCHKLIDFFKDSISRYPKWSNAYDFNFSETEKYKDIAGFYREVEEQGYKVSFESASKKEVDKLVEEGKLYMFQIYNKDFSDKSHGTPNLHTMYFKLLFDENNHGQIRLSGGAELFMRRASLKKEELVVHPANSPIANKNPDNPKKTTTLSYDVYKDKRFSEDQYELHIPIAINKCPKNIFKINTEVRVLLKHDDNPYVIGIDRGERNLLYIVVVDGKGNIVEQYSLNEIINNFNGIRIKTDYHSLLDKKEKERFEARQNWTSIENIKELKAGYISQVVHKICELVEKYDAVIALEDLNSGFKNSRVKVEKQVYQKFEKMLIDKLNYMVDKKSNPCATGGALKGYQITNKFESFKSMSTQNGFIFYIPAWLTSKIDPSTGFVNLLKTKYTSIADSKKFISSFDRIMYVPEEDLFEFALDYKNFSRTDADYIKKWKLYSYGNRIRIFRNPKKNNVFDWEEVCLTSAYKELFNKYGINYQQGDIRALLCEQSDKAFYSSFMALMSLMLQMANSITGRTDVDFLISPVKNSDGIFYDSRNYEAQENAILPKNADANGAYNIARKVLWAIGQFKKAEDEKLDKVKIAISNKEWLEYAQTSVKH

SEQ ID NO: 1065 - protein, 1305 aa, Artificial Sequence
  Synthetic polypeptide
TQFEGFTNLYQVSKTLRFELIPQGKTLKHIQEQGFIEEDKARNDHYKELKPIIDRIYKTYADQCLQLVQLDWENLSAAIDSYRKEKTEETRNALIEEQATYRNAIHDYFIGRTDNLTDAINKRHAEIYKGLFKAELFNGKVLKQLGTVTTTEHENALLRSFDKFTTYFSGFYENRKNVFSAEDISTAIPHRIVQDNFPKFKENCHIFTRLITAVPSLREHFENVKKAIGIFVSTSIEEVFSFPFYNQLLTQTQIDLYNQLLGGISREAGTEKIKGLNEVLNLAIQKNDETAHIIASLPHRFIPLFKQILSDRNTLSFILEEFKSDEEVIQSFCKYKTLLRNENVLETAEALFNELNSIDLTHIFISHKKLETISSALCDHWDTLRNALYERRISELTGKITKSAKEKVQRSLKHEDINLQEIISAAGKELSEAFKQKTSEILSHAHAALDQPLPTTMLKKQEEKEILKSQLDSLLGLYHLLDWFAVDESNEVDPEFSARLTGIKLEMEPSLSFYNKARNYATKKPYSVEKFKLNFQMPTLASGWDVNKEKNNGAILFVKNGLYYLGIMPKQKGRYKALSFEPTEKTSEGFDKMYYDYFPDAAKMIPKCSTQLKAVTAHFQTHTTPILLSNNFIEPLEITKEIYDLNNPEKEPKKFQTAYAKKGQKGYREALCKWIDFTRDFLSKYTKTTSIDLSSLRPSSQYKDLGEYYAELNPLLYHISFQRIAEKEIMDAVETGKLYLFQIYNKDFAKGHHGKPNLHTLYWTGLFSPENLAKTSIKLNGQAELFYRPKSRMKRMAHRLGEKMLNKKLKDQKTPIPDTLYQELYDYVNHRLSHDLSDEARALLPNVITKEVSHEIIKDRRFTSDKFFFHVPITLNYQAANSPSKFNQRVNAYLKEHPETPIIGIDRGERNLIYITVIDSTGKILEQRSLNTIQQFDYQKKLDNREKERVAARQAWSVVGTIKDLKQGYLSQVIHEIVDLMIHYQAVVVLENLNFGFKSKRTGIAEKAVYQQFEKMLIDKLNCLVLKDYPAEKVGGVLNPYQLTDQFTSFAKMGTQSGFLFYVPAPYTSKIDPLTGFVDPFVWKTIKNHESRKHFLEGFDFLHYDVKTGDFILHFKMNRNLSFQRGLPGFMPAWDIVFEKNETQFDAKGTPFIAGKRIVPVIENHRFTGRYRDLYPANELIALLEEKGIVFRDGSNILPKLLENDDSHAIDTMVALIRSVLQMRNSNAATGEDYINSPVRDLNGVCFDSRFQNPEWPMDADANGAYHIALKGQLLLNHLKESKDLKLQNGISNQDWLAYIQELRN

SEQ ID NO: 1066 - protein, 1303 aa, Artificial Sequence
  Synthetic polypeptide
TQFEGFTNLYQVSKTLRFELIPQGKTLKHIQEQGFIEEDKARNDHYKELKPIIDRIYKTYADQCLQLVQLDWENLSAAIDSYRKEKTEETRNALIEEQATYRNAIHDYFIGRTDNLTDAINKRHAEIYKGLFKAELFNGKVLKQLGTVTTTEHENALLRSFDKFTTYFSGFYENRKNVFSAEDISTAIPHRIVQDNFPKFKENCHIFTRLITAVPSLREHFENVKKAIGIFVSTSIEEVFSFPFYNQLLTQTQIDLYNQLLGGISREAGTEKIKGLNEVLNLAIQKNDETAHIIASLPHRFIPLFKQILSDRNTLSFILEEFKSDEEVIQSFCKYKTLLRNENVLETAEALFNELNSIDLTHIFISHKKLETISSALCDHWDTLRNALYERRISELTGKITKSAKEKVQRSLKHEDINLQEIISAAGKELSEAFKQKTSEILSHAHAALDQPLPTTMLKKQEEKEILKSQLDSLLGLYHLLDWFAVDESNEVDPEFSARLTGIKLEMEPSLSFYNKARNYATKKPYSVEKFKLNFQMPTLASGWDVNKEKNNGAILFVKNGLYYLGIMPKQKGRYKALSFEPTEKTSEGFDKMYYDYFPDAAKMIPKCSTQLKAVTAHFQTHTTPILLSNNFIEPLEITKEIYDLNNPEKEPKKFQTAYAKGKGYREALCKWIDFTRDFLSKYTKTTSIDLSSLRPSSQYKDLGEYYAELNPLLYHISFQRIAEKEIMDAVETGKLYLFQIYNKDFAKGHHGKPNLHTLYWTGLFSPENLAKTSIKLNGQAELFYRPKSRMKRMAHRLGEKMLNKKLKDQKTPIPDTLYQELYDYVNHRLSHDLSDEARALLPNVITKEVSHEIIKDRRFTSDKFFFHVPITLNYQAANSPSKFNQRVNAYLKEHPETPIIGIDRGERNLIYITVIDSTGKILEQRSLNTIQQFDYQKKLDNREKERVAARQAWSVVGTIKDLKQGYLSQVIHEIVDLMIHYQAVVVLENLNFGFKSKRTGIAEKAVYQQFEKMLIDKLNCLVLKDYPAEKVGGVLNPYQLTDQFTSFAKMGTQSGFLFYVPAPYTSKIDPLTGFVDPFVWKTIKNHESRKHFLEGFDFLHYDVKTGDFILHFKMNRNLSFQRGLPGFMPAWDIVFEKNETQFDAKGTPFIAGKRIVPVIENHRFTGRYRDLYPANELIALLEEKGIVFRDGSNILPKLLENDDSHAIDTMVALIRSVLQMRNSNAATGEDYINSPVRDLNGVCFDSRFQNPEWPMDADANGAYHIALKGQLLLNHLKESKDLKLQNGISNQDWLAYIQELRN

SEQ ID NO: 1067 - protein, 1301 aa, Artificial Sequence
  Synthetic polypeptide
TQFEGFTNLYQVSKTLRFELIPQGKTLKHIQEQGFIEEDKARNDHYKELKPIIDRIYKTYADQCLQLVQLDWENLSAAIDSYRKEKTEETRNALIEEQATYRNAIHDYFIGRTDNLTDAINKRHAEIYKGLFKAELFNGKVLKQLGTVTTTEHENALLRSFDKFTTYFSGFYENRKNVFSAEDISTAIPHRIVQDNFPKFKENCHIFTRLITAVPSLREHFENVKKAIGIFVSTSIEEVFSFPFYNQLLTQTQIDLYNQLLGGISREAGTEKIKGLNEVLNLAIQKNDETAHIIASLPHRFIPLFKQILSDRNTLSFILEEFKSDEEVIQSFCKYKTLLRNENVLETAEALFNELNSIDLTHIFISHKKLETISSALCDHWDTLRNALYERRISELTGKITKSAKEKVQRSLKHEDINLQEIISAAGKELSEAFKQKTSEILSHAHAALDQPLPTTMLKKQEEKEILKSQLDSLLGLYHLLDWFAVDESNEVDPEFSARLTGIKLEMEPSLSFYNKARNYATKKPYSVEKFKLNFQMPTLASGWDVNKEKNNGAILFVKNGLYYLGIMPKQKGRYKALSFEPTEKTSEGFDKMYYDYFPDAAKMIPKCSTQLKAVTAHFQTHTTPILLSNNFIEPLEITKEIYDLNNPEKEPKKFQTAYAGGYREALCKWIDFTRDFLSKYTKTTSIDLSSLRPSSQYKDLGEYYAELNPLLYHISFQRIAEKEIMDAVETGKLYLFQIYNKDFAKGHHGKPNLHTLYWTGLFSPENLAKTSIKLNGQAELFYRPKSRMKRMAHRLGEKMLNKKLKDQKTPIPDTLYQELYDYVNHRLSHDLSDEARALLPNVITKEVSHEIIKDRRFTSDKFFFHVPITLNYQAANSPSKFNQRVNAYLKEHPETPIIGIDRGERNLIYITVIDSTGKILEQRSLNTIQQFDYQKKLDNREKERVAARQAWSVVGTIKDLKQGYLSQVIHEIVDLMIHYQAVVVLENLNFGFKSKRTGIAEKAVYQQFEKMLIDKLNCLVLKDYPAEKVGGVLNPYQLTDQFTSFAKMGTQSGFLFYVPAPYTSKIDPLTGFVDPFVWKTIKNHESRKHFLEGFDFLHYDVKTGDFILHFKMNRNLSFQRGLPGFMPAWDIVFEKNETQFDAKGTPFIAGKRIVPVIENHRFTGRYRDLYPANELIALLEEKGIVFRDGSNILPKLLENDDSHAIDTMVALIRSVLQMRNSNAATGEDYINSPVRDLNGVCFDSRFQNPEWPMDADANGAYHIALKGQLLLNHLKESKDLKLQNGISNQDWLAYIQELRN

SEQ ID NO: 1068 - protein, 256 aa, Artificial Sequence
  Synthetic polypeptide
  MISC_FEATURE (5)..(120): May be absent
  MISC_FEATURE (141)..(256): May be absent
SGGSSGGSSGGSSGGSSGGSSGGSSGGSSGGSSGGSSGGSSGGSSGGSSGGSSGGSSGGSSGGSSGGSSGGSSGGSSGGSSGGSSGGSSGGSSGGSSGGSSGGSSGGSSGGSSGGSSGGSSGSETPGTSESATPESSGGSSGGSSGGSSGGSSGGSSGGSSGGSSGGSSGGSSGGSSGGSSGGSSGGSSGGSSGGSSGGSSGGSSGGSSGGSSGGSSGGSSGGSSGGSSGGSSGGSSGGSSGGSSGGSSGGSSGGS

SEQ ID NO: 1069 - protein, 32 aa, Artificial Sequence
  Synthetic polypeptide
SGGSSGGSSGSETPGTSESATPESSGGSSGGS

SEQ ID NO: 1070 - protein, 173 aa, Artificial Sequence
  Synthetic polypeptide
AKPAKRIKSAAAAYVPQNRDAVITDIKRIGDLQREASRLETEMNDAIAEITEKFAARIAPIKTDIETLSKGVQGWCEANRDELTNGGKVKTANLVTGDVSWRVRPPSVSIRGMDAVMETLERLGLQRFIRTKQEINKEAILLEPKAVAGVAGITVKSGIEDFSIIPFEQEAGI

SEQ ID NO: 1071 - protein, 2013 aa, Artificial Sequence
  Synthetic polypeptide
MAKPAKRIKSAAAAYVPQNRDAVITDIKRIGDLQREASRLETEMNDAIAEITEKFAARIAPIKTDIETLSKGVQGWCEANRDELTNGGKVKTANLVTGDVSWRVRPPSVSIRGMDAVMETLERLGLQRFIRTKQEINKEAILLEPKAVAGVAGITVKSGIEDFSIIPFEQEAGISGSETPGTSESATPESSSETGPVAVDPTLRRRIEPHEFEVFFDPRELRKETCLLYEINWGGRHSIWRHTSQNTNKHVEVNFIEKFTTERYFCPNTRCSITWFLSWSPCGECSRAITEFLSRYPHVTLFIYIARLYHHADPRNRQGLRDLISSGVTIQIMTEQESGYCWRNFVNYSPSNEAHWPRYPHLWVRLYVLELYCIILGLPPCLNILRRKQPQLTFFTIALQSCHYQRLPPHILWATGLKSGGSSGGSSGSETPGTSESATPESSGGSSGGSDKKYSIGLAIGTNSVGWAVITDEYKVPSKKFKVLGNTDRHSIKKNLIGALLFDSGETAEATRLKRTARRRYTRRKNRICYLQEIFSNEMAKVDDSFFHRLEESFLVEEDKKHERHPIFGNIVDEVAYHEKYPTIYHLRKKLVDSTDKADLRLIYLALAHMIKFRGHFLIEGDLNPDNSDVDKLFIQLVQTYNQLFEENPINASGVDAKAILSARLSKSRRLENLIAQLPGEKKNGLFGNLIALSLGLTPNFKSNFDLAEDAKLQLSKDTYDDDLDNLLAQIGDQYADLFLAAKNLSDAILLSDILRVNTEITKAPLSASMIKRYDEHHQDLTLLKALVRQQLPEKYKEIFFDQSKNGYAGYIDGGASQEEFYKFIKPILEKMDGTEELLVKLNREDLLRKQRTFDNGSIPHQIHLGELHAILRRQEDFYPFLKDNREKIEKILTFRIPYYVGPLARGNSRFAWMTRKSEETITPWNFEEVVDKGASAQSFIERMTNFDKNLPNEKVLPKHSLLYEYFTVYNELTKVKYVTEGMRKPAFLSGEQKKAIVDLLFKTNRKVTVKQLKEDYFKKIECFDSVEISGVEDRFNASLGTYHDLLKIIKDKDFLDNEENEDILEDIVLTLTLFEDREMIEERLKTYAHLFDDKVMKQLKRRRYTGWGRLSRKLINGIRDKQSGKTILDFLKSDGFANRNFMQLIHDDSLTFKEDIQKAQVSGQGDSLHEHIANLAGSPAIKKGILQTVKVVDELVKVMGRHKPENIVIEMARENQTTQKGQKNSRERMKRIEEGIKELGSQILKEHPVENTQLQNEKLYLYYLQNGRDMYVDQELDINRLSDYDVDHIVPQSFLKDDSIDNKVLTRSDKNRGKSDNVPSEEVVKKMKNYWRQLLNAKLITQRKFDNLTKAERGGLSELDKAGFIKRQLVETRQITKHVAQILDSRMNTKYDENDKLIREVKVITLKSKLVSDFRKDFQFYKVREINNYHHAHDAYLNAVVGTALIKKYPKLESEFVYGDYKVYDVRKMIAKSEQEIGKATAKYFFYSNIMNFFKTEITLANGEIRKRPLIETNGETGEIVWDKGRDFATVRKVLSMPQVNIVKKTEVQTGGFSKESILPKRNSDKLIARKKDWDPKKYGGFDSPTVAYSVLVVAKVEKGKSKKLKSVKELLGITIMERSSFEKNPIDFLEAKGYKEVKKDLIIKLPKYSLFELENGRKRMLASAGELQKGNELALPSKYVNFLYLASHYEKLKGSPEDNEQKQLFVEQHKHYLDEIIEQISEFSKRVILADANLDKVLSAYNKHRDKPIREQAENIIHLFTLTNLGAPAAFKYFDTTIDRKRYTSTKEVLDATLIHQSITGLYETRIDLSQLGGDSGGSGGSGGSTNLSDIIEKETGKQLVIQESILMLPEEVEEVIGNKPESDILVHTAYDESTDENVMLLTSDAPEYKPWALVIQDSNGENKIKMLSGGSGGSGGSTNLSDIIEKETGKQLVIQESILMLPEEVEEVIGNKPESDILVHTAYDESTDENVMLLTSDAPEYKPWALVIQDSNGENKIKMLSGGSPKKKRK

SEQ ID NO: 1072 - protein, 239 aa, Rattus norvegicus
MAVGSKPKAALVGPHWERERIWCFLCSTGLGTQQTGQTSRWLRPAATQDPVSPPRSLLMKQRKFLYHFKNVRWAKGRHETYLCYVVKRRDSATSFSLDFGYLRNKSGCHVELLFLRYISDWDLDPGRCYRVTWFTSWSPCYDCARHVADFLRGNPNLSLRIFTARLTGWGALPAGLMSPARPSDYFYCWNTFVENHERTFKAWEGLHENSVRLSRRLRRILLPLYEVDDLRDAFRTLGL

SEQ ID NO: 1073 - protein, 396 aa, Rattus norvegicus
MQPQGLGPNAGMGPVCLGCSHRRPYSPIRNPLKKLYQQTFYFHFKNVRYAWGRKNNFLCYEVNGMDCALPVPLRQGVFRKQGHIHAELCFIYWFHDKVLRVLSPMEEFKVTWYMSWSPCSKCAEQVARFLAAHRNLSLAIFSSRLYYYLRNPNYQQKLCRLIQEGVHVAAMDLPEFKKCWNKFVDNDGQPFRPWMRLRINFSFYDCKLQEIFSRMNLLREDVFYLQFNNSHRVKPVQNRYYRRKSYLCYQLERANGQEPLKGYLLYKKGEQHVEILFLEKMRSMELSQVRITCYLTWSPCPNCARQLAAFKKDHPDLILRIYTSRLYFYWRKKFQKGLCTLWRSGIHVDVMDLPQFADCWTNFVNPQRPFRPWNELEKNSWRIQRRLRRIKESWGL

SEQ ID NO: 1074 - protein, 227 aa, Bos taurus
DGWEVAFRSGTVLKAGVLGVSMTEGWAGSGHPGQGACVWTPGTRNTMNLLREVLFKQQFGNQPRVPAPYYRRKTYLCYQLKQRNDLTLDRGCFRNKKQRHAEIRFIDKINSLDLNPSQSYKIICYITWSPCPNCANELVNFITRNNHLKLEIFASRLYFHWIKSFKMGLQDLQNAGISVAVMTHTEFEDCWEQFVDNQSRPFQPWDKLEQYSASIRRRLQRILTAPI

SEQ ID NO: 1075 - protein, 490 aa, Pan Troglodytes
MNPQIRNPMEWMYQRTFYYNFENEPILYGRSYTWLCYEVKIRRGHSNLLWDTGVFRGQMYSQPEHHAEMCFLSWFCGNQLSAYKCFQITWFVSWTPCPDCVAKLAKFLAEHPNVTLTISAARLYYYWERDYRRALCRLSQAGARVKIMDDEEFAYCWENFVYNEGQPFMPWYKFDDNYAFLHRTLKEIIRHLMDPDTFTFNFNNDPLVLRRHQTYLCYEVERLDNGTWVLMDQHMGFLCNEAKNLLCGFYGRHAELRFLDLVPSLQLDPAQIYRVTWFISWSPCFSWGCAGQVRAFLQENTHVRLRIFAARIYDYDPLYKEALQMLRDAGAQVSIMTYDEFEYCWDTFVYRQGCPFQPWDGLEEHSQALSGRLRAILQVRASSLCMVPHRPPPPPQSPGPCLPLCSEPPLGSLLPTGRPAPSLPFLLTASFSFPPPASLPPLPSLSLSPGHLPVPSFHSLTSCSIQPPCSSRIRETEGWASVSKEGRDLG

SEQ ID NO: 1076 - protein, 190 aa, Gorilla gorilla
MNPQIRNPMKAMYPGTFYFQFKNLWEANDRNETWLCFTVEGIKRRSVVSWKTGVFRNQVDSETHCHAERCFLSWFCDDILSPNTNYQVTWYTSWSPCPECAGEVAEFLARHSNVNLTIFTARLYYFQDTDYQEGLRSLSQEGVAVKIMDYKDFKYCWENFVYNDDEPFKPWKGLKYNFRFLKRRLQEILE

SEQ ID NO: 1077 - protein, 202 aa, Macaca mulatta
MDGSPASRPRHLMDPNTFTFNFNNDLSVRGRHQTYLCYEVERLDNGTWVPMDERRGFLCNKAKNVPCGDYGCHVELRFLCEVPSWQLDPAQTYRVTWFISWSPCFRRGCAGQVRVFLQENKHVRLRIFAARIYDYDPLYQEALRTLRDAGAQVSIMTYEEFKHCWDTFVDRQGRPFQPWDGLDEHSQALSGRLRAILQNQGN

SEQ ID NO: 1078 - protein, 185 aa, Bos taurus
MDEYTFTENFNNQGWPSKTYLCYEMERLDGDATIPLDEYKGFVRNKGLDQPEKPCHAELYFLGKIHSWNLDRNQHYRLTCFISWSPCYDCAQKLTTFLKENHHISLHILASRIYTHNRFGCHQSGLCELQAAGARITIMTFEDFKHCWETFVDHKGKPFQPWEGLNVKSQALCTELQAILKTQQN

SEQ ID NO: 1079 - protein, 210 aa, Macaca mulatta
MALLTAKTFSLQFNNKRRVNKPYYPRKALLCYQLTPQNGSTPTRGHLKNKKKDHAEIRFINKIKSMGLDETQCYQVTCYLTWSPCPSCAGELVDFIKAHRHLNLRIFASRLYYHWRPNYQEGLLLLCGSQVPVEVMGLPEFTDCWENFVDHKEPPSFNPSEKLEELDKNSQAIKRRLERIKSRSVDVLENGLRSLQLGPVTPSSSIRNSR

SEQ ID NO: 1080 - protein, 224 aa, Homo sapiens
MAQKEEAAVATEAASQNGEDLENLDDPEKLKELIELPPFEIVTGERLPANFFKFQFRNVEYSSGRNKTFLCYVVEAQGKGGQVQASRGYLEDEHAAAHAEEAFFNTILPAFDPALRYNVTWYVSSSPCAACADRIIKTLSKTKNLRLLILVGRLFMWEEPEIQAALKKLKEAGCKLRIMKPQDFEYVWQNFVEQEEGESKAFQPWEDIQENFLYYEEKLADILK

SEQ ID NO: 1081 - protein, 224 aa, Mus musculus
MAQKEEAAEAAAPASQNGDDLENLEDPEKLKELIDLPPFEIVTGVRLPVNFFKFQFRNVEYSSGRNKTFLCYVVEVQSKGGQAQATQGYLEDEHAGAHAEEAFFNTILPAFDPALKYNVTWYVSSSPCAACADRILKTLSKTKNLRLLILVSRLFMWEEPEVQAALKKLKEAGCKLRIMKPQDFEYIWQNFVEQEEGESKAFEPWEDIQENFLYYEEKLADILK

SEQ ID NO: 1082 - protein, 224 aa, Rattus norvegicus
MAQKEEAAEAAAPASQNGDDLENLEDPEKLKELIDLPPFEIVTGVRLPVNFFKFQFRNVEYSSGRNKTFLCYVVEAQSKGGQVQATQGYLEDEHAGAHAEEAFFNTILPAFDPALKYNVTWYVSSSPCAACADRILKTLSKTKNLRLLILVSRLFMWEEPEVQAALKKLKEAGCKLRIMKPQDFEYLWQNFVEQEEGESKAFEPWEDIQENFLYYEEKLADILK

SEQ ID NO: 1083 - protein, 224 aa, Bos taurus
MAQKEEAAAAAEPASQNGEEVENLEDPEKLKELIELPPFEIVTGERLPAHYFKFQFRNVEYSSGRNKTFLCYVVEAQSKGGQVQASRGYLEDEHATNHAEEAFFNSIMPTFDPALRYMVTWYVSSSPCAACADRIVKTLNKTKNLRLLILVGRLFMWEEPEIQAALRKLKEAGCRLRIMKPQDFEYIWQNFVEQEEGESKAFEPWEDIQENFLYYEEKLADILK

SEQ ID NO: 1084 - protein, 1824 aa, Artificial Sequence
  Synthetic polypeptide
MSSETGPVAVDPTLRRRIEPHEFEVFFDPRELRKETCLLYEINWGGRHSIWRHTSQNTNKHVEVNFIEKFTTERYFCPNTRCSITWFLSWSPCGECSRAITEFLSRYPHVTLFIYIARLYHHADPRNRQGLRDLISSGVTIQIMTEQESGYCWRNFVNYSPSNEAHWPRYPHLWVRLYVLELYCIILGLPPCLNILRRKQPQLTFFTIALQSCHYQRLPPHILWATGLKSGGSSGGSSGSETPGTSESATPESSGGSSGGSDKKYSIGLAIGTNSVGWAVITDEYKVPSKKFKVLGNTDRHSIKKNLIGALLFDSGETAEATRLKRTARRRYTRRKNRICYLQEIFSNEMAKVDDSFFHRLEESFLVEEDKKHERHPIFGNIVDEVAYHEKYPTIYHLRKKLVDSTDKADLRLIYLALAHMIKFRGHFLIEGDLNPDNSDVDKLFIQLVQTYNQLFEENPINASGVDAKAILSARLSKSRRLENLIAQLPGEKKNGLFGNLIALSLGLTPNFKSNFDLAEDAKLQLSKDTYDDDLDNLLAQIGDQYADLFLAAKNLSDAILLSDILRVNTEITKAPLSASMIKRYDEHHQDLTLLKALVRQQLPEKYKEIFFDQSKNGYAGYIDGGASQEEFYKFIKPILEKMDGTEELLVKLNREDLLRKQRTFDNGSIPHQIHLGELHAILRRQEDFYPFLKDNREKIEKILTFRIPYYVGPLARGNSRFAWMTRKSEETITPWNFEEVVDKGASAQSFIERMTNFDKNLPNEKVLPKHSLLYEYFTVYNELTKVKYVTEGMRKPAFLSGEQKKAIVDLLFKTNRKVTVKQLKEDYFKKIECFDSVEISGVEDRFNASLGTYHDLLKIIKDKDFLDNEENEDILEDIVLTLTLFEDREMIEERLKTYAHLFDDKVMKQLKRRRYTGWGRLSRKLINGIRDKQSGKTILDFLKSDGFANRNFMQLIHDDSLTFKEDIQKAQVSGQGDSLHEHIANLAGSPAIKKGILQTVKVVDELVKVMGRHKPENIVIEMARENQTTQKGQKNSRERMKRIEEGIKELGSQILKEHPVENTQLQNEKLYLYYLQNGRDMYVDQELDINRLSDYDVDHIVPQSFLKDDSIDNKVLTRSDKNRGKSDNVPSEEVVKKMKNYWRQLLNAKLITQRKFDNLTKAERGGLSELDKAGFIKRQLVETRQITKHVAQILDSRMNTKYDENDKLIREVKVITLKSKLVSDFRKDFQFYKVREINNYHHAHDAYLNAVVGTALIKKYPKLESEFVYGDYKVYDVRKMIAKSEQEIGKATAKYFFYSNIMNFFKTEITLANGEIRKRPLIETNGETGEIVWDKGRDFATVRKVLSMPQVNIVKKTEVQTGGFSKESILPKRNSDKLIARKKDWDPKKYGGFDSPTVAYSVLVVAKVEKGKSKKLKSVKELLGITIMERSSFEKNPIDFLEAKGYKEVKKDLIIKLPKYSLFELENGRKRMLASAGELQKGNELALPSKYVNFLYLASHYEKLKGSPEDNEQKQLFVEQHKHYLDEIIEQISEFSKRVILADANLDKVLSAYNKHRDKPIREQAENIIHLFTLTNLGAPAAFKYFDTTIDRKRYTSTKEVLDATLIHQSITGLYETRIDLSQLGGDSGGSGGSGGSTNLSDIIEKETGKQLVIQESILMLPEEVEEVIGNKPESDILVHTAYDESTDENVMLLTSDAPEYKPWALVIQDSNGENKIKMLSGGSGGSGGSTNLSDIIEKETGKQLVIQESILMLPEEVEEVIGNKPESDILVHTAYDESTDENVMLLTSDAPEYKPWALVIQDSNGENKIKMLSGGSPKKKRK
